(19) United States
(12) Patent Application Publication
(10) Pub. No.: US 2026/0216139 A1
(43) Pub. Date: Jul. 30, 2026

(54) METHOD FOR TREATING NEUROLOGICAL DISEASES THROUGH GLIAL PRUNING REGULATION

(71) Applicant: Fred Hutchinson Cancer Center, Seattle, WA (US)

(72) Inventors: Aakanksha Singhvi, Seattle, WA (US); Stephan Raiders, Seattle, WA (US)

(73) Assignee: Fred Hutchinson Cancer Center, Seattle, WA (US)

(21) Appl. No.: 19/139,298

(22) PCT Filed: Dec. 14, 2023
(86) PCT No.: PCT/US2023/084125

§ 371 Date: Jun. 13, 2025

Related U.S. Application Data
(60) Provisional application No. 63/387,330, filed on Dec. 14, 2022.

(51) Int. Cl. A61K 31/416; A61K 31/12; A61K 31/5377

(52) U.S. Cl. CPC A61K 31/416; A61K 31/12; A61K 31/5377

(57) ABSTRACT

Methods for regulating aberrant glia-directed engulfment and active pruning of Neuronal Receptive Endings (NRE) are provided. Such methods comprise contacting a neuronal and/or glia cell with an effective amount of a composition which is effective in modulating at least one gene and/or protein associated with glia-directed engulfment and active pruning of Neuronal Receptive Endings. Such methods are useful in treating neurological disorders such as Parkinson's disease.

### CROSS-REFERENCE TO RELATED APPLICATION

[0001] This application claims the benefit of U.S. Provisional Patent Application No. U.S. 63/387,330, filed Dec. 14, 2022, the disclosure of which is hereby incorporated by reference in its entirety.

### STATEMENT OF GOVERNMENT LICENSE RIGHTS

[0002] This invention was made with Government support under NS118958, AG066574, and NS114222 awarded by National Institutes of Health. The Government has certain rights in the invention.

### STATEMENT REGARDING SEQUENCE LISTING

[0003] The Sequence Listing XML associated with this application is provided in XML format and is hereby incorporated by reference into the specification. The name of the XML file containing the sequence listing is 1896-P67WO_Seq_List_20231214.xml. The XML file is 4,675,801 bytes; was created on Dec. 14, 2023; and is being submitted electronically via Patent Center with the filing of the specification.

### BACKGROUND

[0004] The formation of mature neural circuits requires selective pruning of inappropriate synapses and strengthening of appropriate synaptic connections. This process is critical to normal brain maturation; disruptions are thought to contribute to neurological dysfunction. Glia, non-neuronal brain cells, contribute to this process. Aberrant uptake of neuron fragments by glia is associated with neuro-developmental and neuro-degenerative diseases such as epilepsy, Alzheimer's dementia, and cognitive decline.

[0005] Parkinson's disease (PD) is currently the second most prevalent neurodegenerative disease and is one of the world's fastest growing neurological disorders. One study estimates that by 2037, in the US alone, Parkinson's disease will affect more than 1.6 million people and have an economic burden exceeding $79 billion. Currently, no treatment exists to slow or terminate the disease progression of Parkinson's disease. Therefore, there remains a need for understanding the mechanisms involved in PD and for the development of effective therapeutics and other treatment options for treating, preventing, and/or delaying onset of PD.

### SUMMARY

[0006] This summary is provided to introduce a selection of concepts in a simplified form that are further described below in the Detailed Description. This summary is not intended to identify key features of the claimed subject matter, nor is it intended to be used as an aid in determining the scope of the claimed subject matter.

[0007] In some aspects, provided herein is a method for regulating an aberrant glia-directed engulfment and active pruning of Neuronal Receptive Endings (NRE), the method comprising contacting a neuronal and/or a glia cell with an effective amount of a composition effective in modulating at least one gene and/or protein associated with glia-directed engulfment and active pruning of Neuronal Receptive Endings (NRE).

[0008] In other aspects, provided herein is a method for treating a neurodegenerative disease in a subject in need thereof, the method comprising administering to the subject an effective amount of a therapeutic composition effective in modulating at least one gene and/or protein associated with glia-directed active pruning of Neuronal Receptive Endings (NRE).

[0009] In yet other aspects, provided herein is a method for treating, preventing, or delaying onset of Parkinson's Disease in a subject in need thereof, the method comprising administering to the subject a therapeutically effective amount of a composition effective in modulating at least one gene and/or protein associated with Parkinson's Disease (PD), wherein the gene and/or protein is expressed in a glia cell.

[0010] In additional aspects, provided herein is a method for the treatment of Parkinson's disease comprising administering to a subject in need thereof a composition effective in modulating the activity of Janus N-terminal Kinase (JNK) or an isoform thereof, wherein the composition is targeted for delivery to glia cells, and wherein the subject harbors a loss of function gene mutation in PARKIN or PINK1.

[0011] In further aspects, provided herein is a method for the treatment of Parkinson's disease comprising administering to the subject in need thereof a composition effective in modulating CED-10/Rac-1 or an isoform thereof, wherein the composition is targeted for delivery to the glia, and wherein the subject harbors a loss of function gene mutation in PARKIN or PINK1.

### DESCRIPTION OF THE DRAWINGS

[0012] The foregoing aspects and many of the attendant advantages of this invention will become more readily appreciated as the same become better understood by reference to the following detailed description, when taken in conjunction with the accompanying drawings, wherein:

[0013] FIG. 1A shows an increase in engulfed fragments of pdr-1 and pink-1, thereby demonstrating PDR-1 and PINK-1 regulate engulfment;

[0014] FIG. 1B shows the size of “eaten” puncta in glia are unchanged, and thus the rate of eating is altered;

[0015] FIG. 2A shows LRK-1 regulates engulfment, as shown by the reduced number of fragments from Irk-relative to wildtype;

[0016] FIG. 2B shows DJR-1.2 regulates engulfment, as shown by the increased number of fragments of djr-1.2 relative to wildtype;

[0017] FIG. 3 shows JNK signaling regulates engulfment, wherein kgb-1 and kgb-2 have opposite effects on glial engulfment while jnk-1 has no effect, as demonstrated by a similar number of fragments identified for jnk-1 while kgb-1 and kgb-2 exhibit decreased and increased number of fragments, respectively;

[0018] FIG. 4A shows PINK-1 acts in glia, wherein expressing PINK-1 in glia rescues glial engulfment defects back to wild type levels, thereby demonstrating its function is required in glia;

[0019] FIG. 4B shows PINK-1 does not act in neurons, wherein expressing PINK-1 in neurons does not rescue glial engulfment defects back to wild type levels;

[0020] FIG. 5A shows PDR-1 acts in glia, wherein expressing PDR-1 in glia rescues glial engulfment, as demonstrated by a similar number of fragments identified upon glia rescue compared with wildtype and a decreased number of fragments as compared with pdr-1; over-expression of PDR-1 in glia also alters pruning levels compared to wild type;

[0021] FIG. 5B shows PDR-1 acts in glia, wherein glial PDR-1 rescues defects pdr-1; pink-1 double mutants, as demonstrated by rescue of double mutant defects upon over-expression of PDR-1 in glia;

[0022] FIG. 5C shows PDR-1 expression in neurons does not rescue the mutant defects;

[0023] FIG. 6A shows PDR-1 (Parkin) and PINK-1 are not in the same pathway, wherein PDR-1 and PINK-1 work independently to regulate glial engulfment, and losing both causes strong defects in glial engulfment, as demonstrated by the increased number of fragments for pdr-1; pink-1 relative to wildtype, for animals just prior to sexual maturation (pre-adult);

[0024] FIG. 6B shows PDR-1 (Parkin) and PINK-1 are not in the same pathway, wherein PDR-1 and PINK-1 work independently to regulate glial engulfment, and losing both causes strong defects in glial engulfment, as demonstrated by the increased number of fragments for pdr-1; pink-1 relative to wildtype, for animals at sexual maturation (young adult);

[0025] FIG. 7 shows pdr-1 mutants result in premature engulfment, as demonstrated by a higher number of engulfed fragments in glia of pdr-1 mutants (right bar) compared to wild type (left bar) at 0 hrs, 16 hrs, and 20 hours during transition to sexually mature adult (post-L4);

[0026] FIG. 8 shows a second pdr-1 mutant also results in premature onset of engulfment, as demonstrated by a higher number of engulfed fragments in glia of pdr-1 mutants (right bar) compared to wild type (left bar) at 0 hrs, 16 hrs, and 20 hours during transition to sexually mature adult (post-L4);

[0027] FIG. 9 shows pdr-1 mutants have variable engulfment that persists in sexually mature adults, suggesting that steady-state engulfment is not altered and regulation is related to the timing of when the process starts, as demonstrated by increased engulfed fragments in glia of pdr-1 mutant animals (right bars in each set) at day 1 (young) adults but not day 4 adults (nearing end of sexual maturity) compared to wild type (left bars in each set);

[0028] FIG. 10 shows disrupting mitophagy does not affect glial engulfment, wherein loss of loss of ucp-4 inhibits mitophagy, but such loss alone does not affect glial engulfment by itself, nor does it affect the pdr-1 phenotype;

[0029] FIG. 11A shows PDR-1 is at the glial tip that contacts the AFD-ending which is digested and is not associated with engulfed fragments in the glial cell body, as demonstrated by expression analysis, and thus PDR-1 is at the active site to regulate engulfment and not likely in the endolysosome degradation machinery;

[0030] FIG. 11B shows PDR-1 becomes localized into the nucleus by excess CED-10; increased levels of CED-10/Rac1 translocate PDR-1/Parkin to glial nuclei;

[0031] FIG. 12 shows different isoforms exist for PDR-1 and that the mutation in gk448 loses isoform B with the Ubl domain, but maintains isoform A with RING2 domain;

[0032] FIG. 13A shows the loss of Ubl domain alone is sufficient to cause defects, wherein PDR-1 requires its N-terminal Ubl domain;

[0033] FIG. 13B shows the different mutations in pdr-1 and that loss of Ubl domain alone is sufficient to cause defects similar to complete loss of PDR-1, wherein PDR-1 requires its N-terminal Ubl domain;

[0034] FIG. 14 shows the PINK-1 kinase domain regulates function, wherein mutations that retain the Ser/Thr kinase domain function of PINK-1 do not show defects like the complete null mutation, as demonstrated by increased engulfed fragments in glia only in the pink-1 (tm1779) null mutant;

[0035] FIG. 15A shows PDR-1 acts through JNK signaling in glia engulfment, wherein loss of the JNK kinase KGB-1 abrogates pdr-1 mutant defects, indicating PDR-1 acts with KGB-1 to regulate engulfment in pre-adult animals;

[0036] FIG. 15B shows PDR-1 acts through JNK signaling in glia engulfment, wherein loss of the JNK kinase KGB-1 abrogates pdr-1 mutant defects, indicating PDR-1 acts through KGB-1 to regulate engulfment in adult animals;

[0037] FIG. 16 shows a JNK inhibitor blocks precocious engulfment of pdr-1, wherein precocious engulfment of a pre-adult is suppressed;

[0038] FIG. 17 shows PINK-1 acts through JNK signaling in glia engulfment independent from PDR, where blocking JNK signaling suppresses pink-1 defects, as demonstrated by rescue of increased glial fragments of pink-1 mutants alone by a secondary mutation in kgb-1;

[0039] FIG. 18 shows PDR-1 acts through CED-10/Rac1 in glia engulfment, wherein loss of CED-10/Rac1 GTPase mutants can suppress pdr-1 mutant defects;

[0040] FIG. 19 shows PDR-1 regulates CED-10/Rac1 levels in glia, wherein null pdr-1 mutants lose CED-10 localization while some alleles have excess, indicating normal levels of CED-10 at the glia tip where engulfment occurs is regulated by PDR-1;

[0041] FIG. 20A shows blocking CED-10 alters engulfment defects in adults, as demonstrated by reduction in the number of fragments in glia of pdr-1 mutants with the Rac1 inhibitor;

[0042] FIG. 20B shows that a Rac inhibitor drug has pleiotropic defects in engulfment, as seen by longer engulfed glia fragments compared to steady-state wildtype animals when treated with Rac1 inhibitors;

[0043] FIG. 21A shows expressing the glia-specific uncoupling factor UCP-4 in glia can suppress engulfment defects of pdr-1 lesion animals, wherein altering mitochondrial uncoupling alone does not affect glial engulfment (ucp-4 mutant), as demonstrated by a reduced number of engulfed fragments in glia in double transgenic animals;

[0044] FIG. 21B shows DNP does not suppress engulfment defects, as demonstrated by there being no change in number of engulfed glial fragments in pdr-1 mutant animals;

[0045] FIG. 21C shows pruning increase similar to loss of pdr-1, upon treatment with 10 μM of the drug EHOP-016 which inhibits CED-10/Rac1 without losing gene product (left); the pdr-1 defect is also increased (right);

[0046] FIG. 22 shows altering glial mitochondria dynamics affects engulfment, wherein miro-1 traffics mitochondria to extremities, and active cells require fzo-1 for mitochondria fusion, as demonstrated by altered number of engulfed AFD neuron fragments in glia of fzo-1 or miro-1 mutant animals;

[0047] FIG. 23A shows the drug MG-132 suppresses pdr-1 defects, wherein MG-132 can induce JNK activity and reduce Rac1 activity, as demonstrated by reduction in number of engulfed fragments of neuron within glia of pdr-1 mutant animals upon MG-132 exposure;

[0048] FIG. 23B shows the drug rapamycin does not affect pdr-1, as demonstrated by no change in number of engulfed fragments in glia of pdr-1 mutant animals upon rapamycin exposure; rapamycin can induce JNK activity, suggesting that specific JNK activities are differently regulated in glia.

### DETAILED DESCRIPTION

[0049] The present disclosure describes a method for regulating glia-directed engulfment and pruning of Neuronal Receptive Endings (NRE) for use in treating neurological diseases such as Parkinson's disease (PD) in a subject, comprising delivering to a subject a therapeutically effective amount of a composition effective in modulating at least one gene and/or protein in a glia cell. In some embodiments, the at least one gene and/or protein is associated with glia-directed engulfment and pruning of Neuronal Receptive Endings (NRE).

[0050] Unless specifically defined herein, all terms used herein have the same meaning as they would to one skilled in the art.

[0051] As used herein, “or” in the claims is used to mean “and/or” unless explicitly indicated to refer to alternatives only, or the alternatives are mutually exclusive.

[0052] Following long-standing patent law, the words “a” and “an,” when used in conjunction with the word “comprising” in the claims or specification, denotes one or more, unless specifically noted.

[0053] Unless the context clearly requires otherwise, throughout the description and the claims, the words “comprise,” “comprising,” and the like, are to be construed in an inclusive sense as opposed to an exclusive or exhaustive sense, and to indicate “including, but not limited to.” Words using the singular or plural number also include the plural and singular number, respectively. Additionally, the words “herein,” “above,” and “below,” and words of similar import, when used in this application, shall refer to this application as a whole and not to any particular portions of the application.

[0054] As used herein, “about” refers to an acceptable degree of error for the quantity measured given the nature or precision of the measurements. Typical, exemplary degrees of error are within ±20 percent (%); within ±10%; or within ±5% of a given value or range of values. Any reference to “about X” specifically indicates at least the values X, 0.90X, 0.91X, 0.92X, 0.93X, 0.94X, 0.95X, 0.96X, 0.97X, 0.98X, 0.99X, 1.01X, 1.02X, 1.03X, 1.04X, 1.05X, 1.06X, 1.07X, 1.08X, 1.09X, and 1.10X. Thus, “about X” is intended to teach and provide written support for a claim limitation of, e.g., “0.98X.” Alternatively, in biological systems, the term “about” can mean values that are within an order of magnitude, within 5-fold, or within 2-fold of a given value. Numerical quantities given herein are approximate unless stated otherwise, meaning that the term “about” can be inferred when not expressly stated.

[0055] As used herein, “subject” encompasses, without limitation, a mammal, which includes all mammals such as humans, non-human primates, dogs, cats, horses, sheep, goats, cows, rabbits, pigs, and rodents. As used herein, the term “subject” and “patient” may be used interchangeably, and mean a mammal in need of treatment, e.g., companion/domestic animals (e.g., dogs, cats, horses, rabbits, and the like), farm animals (e.g., cows, pigs, horses, sheep, goats, and the like) and laboratory animals (e.g., rats, mice, guinea pigs and the like). Typically, the subject is a human in need of treatment.

[0056] As used herein, “treating” means the treatment of the disease or condition of interest in a mammal, preferably a human, having the disease or condition of interest, and includes:
[0057] (a) preventing the disease or condition from occurring in a mammal, in particular, when such mammal is predisposed to the condition but has not yet been diagnosed as having it;
[0058] (b) inhibiting the disease or condition, i.e., arresting the disease or condition development, or delaying the onset of the disease or condition;
[0059] (c) relieving (or ameliorating) the disease or condition, i.e., causing regression of the disease or condition; or
[0060] (d) relieving (or ameliorating) the symptoms resulting from the disease or condition, e.g., without addressing the underlying disease or condition.

[0061] The terms “treating” or ‘treatment” also refer to obtaining a desired pharmacological and/or physiological effect.

[0062] As used herein, the term “neurodegenerative disease” refers to a disease or condition in which the function of a subject's nervous system becomes impaired. Examples of neurodegenerative diseases that may be treated with the method described herein are selected from Alzheimer's disease, autism spectrum, leprosy, glioma, Parkinson disease, drug-induced Parkinsonism, Idiopathic Parkinson's disease, Autosomal dominant Parkinson disease, familial type 1 (PARK1), Parkinson disease 3, autosomal dominant Lewy body (PARK3), Parkinson disease 4, autosomal dominant Lewy body (PARK4), Parkinson disease 5 (PARK5), Parkinson disease 6, autosomal recessive early-onset (PARK6), Parkinson disease 2, autosomal recessive juvenile (PARK2), Parkinson disease 7, autosomal recessive early-onset (PARK7), Parkinson disease 8 (PARK8), Parkinson disease 9 (PARK9), Parkinson disease 10 (PARK10), Parkinson disease 11 (PARK11), Parkinson disease 12 (PARK12), Parkinson disease 13 (PARK13), and/or Mitochondrial Parkinson's disease.

[0063] As used herein, “signaling pathway” refers to a series of interactions between cellular and optionally extra-cellular components (e.g., proteins, nucleic acids, small molecules, ions, lipids) that conveys a change in one component to one or more other components, which in turn may convey a change to additional components, which is optionally propagated to other signaling pathway components.

[0064] As used herein, “therapeutically effective amount” or “effective amount” refers to the amount of a compound of the disclosure that, when administered to a mammal (e.g., a human), is sufficient to effect treatment as defined herein, reduction in symptoms, cure, prevention of onset, or delayed onset, of a disease or condition in the mammal, preferably a human. The amount of a composition of the disclosure which constitutes a “therapeutically effective amount” or an “effective amount” will vary depending on the composition; the condition and its severity; the manner of administration; and the age, weight, and genetics of the mammal to be treated, but can be determined routinely by one of ordinary skill in the art having regard to his own knowledge and to this disclosure.

[0065] As used herein, “aberrant” means a glia-directed engulfment and active pruning of NREs which is different from that found in a typical or average organism, such as a human. For example, an aberrant engulfment and active pruning can be an amount or rate which is more than the amount or rate in which engulfment and active pruning typically occur, can be an amount or rate which is less than the amount or rate in which engulfment and active pruning typically occur, can occur at a time which differs from the time in which engulfment and active pruning typically occur, can occur at an age which differs from the age in which engulfment and active pruning typically occur, or it can be a combination of any of the foregoing. Each of the foregoing applies to one or more than one gene, and/or one or more than one protein, wherein each gene or protein can be the same or can be different.

[0066] As used herein, “engulfment” means the taking up, consumption, cleavage, digestion, or the like, of the matter (e.g., neuronal receptive ending matter) which was pruned from the neuron.

[0067] As used herein, “pruning” means the cleavage, digestion, removal, or the like, wherein the matter being pruned (e.g., neuronal receptive ending matter) is entirely pruned from the neuron, or wherein at least about 90% is pruned from the neuron, at least about 80% is pruned from the neuron, at least about 70% is pruned from the neuron, at least about 60% is pruned from the neuron, at least about 50% is pruned from the neuron, at least about 40% is pruned from the neuron, at least about 30% is pruned from the neuron, at least about 20% is pruned from the neuron, or at least about 10% is pruned from the neuron.

[0068] As used herein, “active” pruning means pruning which occurs that is not a part of any phagocytic function of glial cells.

[0069] As used herein, “regulating” means adjusting the amount, rate, timing, or stage such as to obtain an amount, rate, timing, or stage which is about the amount, rate, timing, or stage as is typically found in an organism such as a human, or which is the amount, rate, timing, or stage of an average organism, such as a human. The adjusted amount, rate, timing, or stage can vary from the typical or average amount, rate, timing, or stage by up to about 50%, up to about 40%, up to about 30%, up to about 20%, or up to about 10%.

[0070] As used herein, “pre-mature” onset means onset of glia-mediated NRE engulfment before the time or life stage in which onset typically occurs in an organism, or occurs in the average organism, such as a human.

[0071] As used herein, “delayed” onset means onset of glia-mediated NRE engulfment later than the time or life stage in which onset typically occurs in an organism, or occurs in the average organism, such as a human.

[0072] The composition disclosed herein can be a pharmaceutically acceptable salt. A “pharmaceutically acceptable salt” includes both acid and base addition salts.

[0073] A pharmaceutically acceptable acid addition salt refers to salts which retain the biological effectiveness and properties of the free bases, which are not biologically, or otherwise, undesirable, and which are formed with inorganic acids such as, but not limited to, hydrochloric acid, hydrobromic acid, sulfuric acid, nitric acid, phosphoric acid and the like, and organic acids such as, but not limited to, acetic acid, 2,2-dichloroacetic acid, adipic acid, alginic acid, ascorbic acid, aspartic acid, benzenesulfonic acid, benzoic acid, 4-acetamidobenzoic acid, camphoric acid, camphor-10-sulfonic acid, capric acid, caproic acid, caprylic acid, carbonic acid, cinnamic acid, citric acid, cyclamic acid, dodecylsulfuric acid, ethane-1,2-disulfonic acid, ethanesulfonic acid, 2-hydroxyethanesulfonic acid, formic acid, fumaric acid, galactaric acid, gentisic acid, glucoheptonic acid, gluconic acid, glucuronic acid, glutamic acid, glutaric acid, 2-oxo-glutaric acid, glycerophosphoric acid, glycolic acid, hippuric acid, isobutyric acid, lactic acid, lactobionic acid, lauric acid, maleic acid, malic acid, malonic acid, mandelic acid, methanesulfonic acid, mucic acid, naphthalene-1,5-disulfonic acid, naphthalene-2-sulfonic acid, 1-hydroxy-2-naphthoic acid, nicotinic acid, oleic acid, orotic acid, oxalic acid, palmitic acid, pamoic acid, propionic acid, pyroglutamic acid, pyruvic acid, salicylic acid, 4-aminosalicylic acid, sebacic acid, stearic acid, succinic acid, tartaric acid, thiocyanic acid, p-toluenesulfonic acid, trifluoroacetic acid, undecylenic acid, and the like.

[0074] A pharmaceutically acceptable base addition salt refers to salts which retain the biological effectiveness and properties of the free acids, which are not biologically or otherwise undesirable. These salts are prepared from addition of an inorganic base or an organic base to the free acid. Salts derived from inorganic bases include, but are not limited to, the sodium, potassium, lithium, ammonium, calcium, magnesium, iron, zinc, copper, manganese, aluminum salts, and the like. Preferred inorganic salts are ammonium, sodium, potassium, calcium, and magnesium salts. Salts derived from organic bases include, but are not limited to, salts of primary, secondary, and tertiary amines, substituted amines including naturally occurring substituted amines, cyclic amines and basic ion exchange resins, such as ammonia, isopropylamine, trimethylamine, diethylamine, triethylamine, tripropylamine, diethanolamine, ethanolamine, deanol, 2-dimethylaminoethanol, 2-diethylaminoethanol, dicyclohexylamine, lysine, arginine, histidine, caffeine, procaine, hydrabamine, choline, betaine, benethamine, benzathine, ethylenediamine, glucosamine, methylglucamine, theobromine, triethanolamine, tromethamine, purines, piperazine, piperidine, N-ethylpiperidine, polyamine resins, and the like. Particularly preferred organic bases are isopropylamine, diethylamine, ethanolamine, trimethylamine, dicyclohexylamine, choline, and caffeine.

[0075] As used herein, “Parkin” or “PARK2” refers to any native Parkin encoded by the Parkin gene or its ortholog. The term encompasses “full-length,” unprocessed Parkin as well as any form of Parkin that results from processing in the cell, isoforms, and recombinant forms of Parkin. The term also encompasses naturally occurring Parkin and variants of Parkin, e.g., splice variants or allelic variants, functional fragments, isoforms, and homologs, thereof. The term includes Parkin and variants thereof that maintain Parkin activity (e.g., within at least 30%/a, 40%, 50%, 60%, 70%, 80%, 90%, 95%, or 100% activity compared to Parkin). The DNA sequence of an exemplary human Parkin is shown in SEQ ID NO: 24. The RNA sequence of an exemplary C. Elegans PDR-1 is shown in SEQ ID NOs: 1-3.

[0076] The term “PINK1,” “PINK,” “PINK-1,” or “PARK8” is used to refer to any native PINK1 encoded by the PINK1 gene or its ortholog. The term encompasses “full-length,” unprocessed PINK1 as well as any form of PINK1 that results from processing in the cell, isoforms and variants of PINK1, e.g., splice variants or allelic variants, functional fragments, and homologs, thereof. The term includes a recombinant or naturally occurring form of PINK1 (e.g. “PTEN induced putative kinase 1”; Entrez Gene 65018, OMIM 608309, UniProtKB Q9BXM7, and/or RefSeq (protein) NP_115785.1). The term includes PINK1 and variants thereof that maintain PINK1 activity (e.g. within at least 30%/a, 40%, 50%, 60%, 70%, 80%, 90%, 95%, or 100% activity compared to PINK1). The DNA sequence of an exemplary human PINK1 is shown in SEQ ID NO: 25. The RNA sequence of an exemplary C. Elegans PINK-1 is shown in SEQ ID NO: 6.

[0077] The term “UCP4” or “UCP-4” refers to any native UCP4 encoded by the UCP4 gene or its ortholog. The term encompasses “full-length,” unprocessed UCP4 as well as any form of UCP4 that results from processing in the cell, isoforms and variants of UCP4, e.g., splice variants or allelic variants, functional fragments, and homologs, thereof. The term includes and recombinant or naturally occurring form of UCP4. The term includes UCP4 and variants thereof that maintain UCP4 activity (e.g. within at least 30%/a, 40%, 50%, 60%, 70%, 80%, 90%, 95%, or 100% activity compared to UCP4). The RNA sequence of an exemplary C. Elegans UCP4 is shown in SEQ ID NO: 15. The DNA sequence of an exemplary human UCP4 ortholog, SLC25A7, is shown in SEQ ID NO: 36.

[0078] The term “CED-10” refers to any native CED-10 encoded by the CED-10 gene or its ortholog. The term encompasses “full-length,” unprocessed CED-10 as well as any form of CED-10 that results from processing in the cell, isoforms and variants of CED-10, e.g., splice variants or allelic variants, functional fragments, and homologs, thereof. The term includes and recombinant or naturally occurring form of CED-10. The term includes CED-10 and variants thereof that maintain CED-10 activity (e.g. within at least 30%/a, 40%, 50%, 60%, 70%, 80%, 90%, 95%, or 100% activity compared to CED-10). The RNA sequence of an exemplary C. Elegans CED-10 is shown in SEQ ID NOs: 4 and 5. The DNA sequence of an exemplary human CED-10 ortholog, Rac1, is shown in SEQ ID NO: 26.

[0079] The term “JNK” refers to any native JNK encoded by the JNK gene or its ortholog. The term encompasses “full-length,” unprocessed JNK as well as any form of JNK that results from processing in the cell, isoforms and variants of JNK, e.g., splice variants or allelic variants, functional fragments, and homologs, thereof. The term includes recombinant or naturally occurring form of JNK. The term includes JNK and variants thereof that maintain JNK activity (e.g. within at least 30%/a, 40%, 50%, 60%, 70%, 80%, 90%, 95%, or 100% activity compared to JNK). The RNA sequence of an exemplary C. Elegans JNK is shown in SEQ ID NOs: 9 and 10. The DNA sequence of an exemplary human JNK ortholog, MAPK8, is shown in SEQ ID NO: 43.

[0080] The term “CED-2” refers to any native CrkII encoded by the CRK or CRKL genes or its ortholog. The term encompasses “full-length,” unprocessed CED-2 as well as any form of CED-2 that results from processing in the cell, isoforms and variants of CED-2, e.g., splice variants or allelic variants, functional fragments, and homologs, thereof. The term includes recombinant or naturally occurring form of CED-2. The term includes CED-2 and variants thereof that maintain CED-2 activity (e.g. within at least 30%/a, 40%, 50%, 60%, 70%, 80%, 90%, 95%, or 100% activity compared to CED-2). The RNA sequence of an exemplary C. elegans CED-2 is shown in SEQ ID NOs: 16. The DNA sequence of an exemplary human ortholog, CRK is shown in SEQ ID NO: 29

[0081] The term “CED-5” refers to any native DOCK encoded by the CED-5 gene or its ortholog. The term encompasses “full-length,” unprocessed CED-5 as well as any form of CED-5 that results from processing in the cell, isoforms and variants of CED-5, e.g., splice variants or allelic variants, functional fragments, and homologs, thereof. The term includes recombinant or naturally occurring form of CED-5. The term includes CED-5 and variants thereof that maintain CED-5 activity (e.g. within at least 30%/a, 40%, 50%, 60%, 70%, 80%, 90%, 95%, or 100% activity compared to CED-5). The RNA sequence of an exemplary C. elegans CED-5 is shown in SEQ ID NOs: 17. The DNA sequence of an exemplary human ortholog, DOCK1 is shown in SEQ ID NO: 30. Other orthologs include DOCK2, DOCK3, DOCK4, DOCK5.

[0082] The term “CED-12” refers to any native CED-12/ELMO encoded by the ELMO genes or its ortholog. The term encompasses “full-length,” unprocessed CED-12 as well as any form of CED-12 that results from processing in the cell, isoforms and variants of CED-12, e.g., splice variants or allelic variants, functional fragments, and homologs, thereof. The term includes recombinant or naturally occurring form of CED-12. The term includes CED-12 and variants thereof that maintain CED-12 activity (e.g. within at least 30%/a, 40%, 50%, 60%, 70%, 80%, 90%, 95%, or 100% activity compared to CED-12). The RNA sequence of an exemplary C. elegans CED-12 is shown in SEQ ID NOs: 18. The DNA sequence of an exemplary human ortholog, ELMO1 is shown in SEQ ID NO: 31. Other orthologs include ELMO2 (SEQ ID NO: 32) and ELMO3 (SEQ ID NO: 33).

[0083] The term “TAT-1” refers to any native TAT-1 encoded by the ATP8A gene or its ortholog. The term encompasses “full-length,” unprocessed TAT-1 as well as any form of TAT-1 that results from processing in the cell, isoforms and variants of TAT-1, e.g., splice variants or allelic variants, functional fragments, and homologs, thereof. The term includes recombinant or naturally occurring form of TAT-1. The term includes TAT-1 and variants thereof that maintain TAT-1 activity (e.g. within at least 30%/a, 40%, 50%, 60%, 70%, 80%, 90%, 95%, or 100% activity compared to TAT-1). The RNA sequence of an exemplary C. elegans TAT-1 is shown in SEQ ID NOs: 19, 20, 21. The DNA sequence of an exemplary human ortholog, ATP8A is shown in SEQ ID NOs: 27 and 28.

[0084] The term “LRK-1” refers to any native LRRK2 encoded by the LRRK2 gene or its ortholog. The term encompasses “full-length,” unprocessed LRRK2 as well as any form of LRRK2 that results from processing in the cell, isoforms and variants of LRRK2, e.g., splice variants or allelic variants, functional fragments, and homologs, thereof. The term includes recombinant or naturally occurring form of LRRK2. The term includes LRRK2 and variants thereof that maintain LRRK2 activity (e.g. within at least 30%/a, 40%, 50%, 60%, 70%, 80%, 90%, 95%, or 100% activity compared to LRRK2). The DNA sequence of LRRK2, the exemplary human ortholog of C. elegans LRK-1, is shown in SEQ ID NO: 34.

[0085] The term “PSR-1” refers to any native JMJD6 encoded by the JMJD6 gene or its ortholog. The term encompasses “full-length,” unprocessed JMJD6 as well as any form of JMJD6 that results from processing in the cell, isoforms and variants of JMJD6, e.g., splice variants or allelic variants, functional fragments, and homologs, thereof. The term includes recombinant or naturally occurring form of JMJD6. The term includes JMJD6 and variants thereof that maintain JMJD6 activity (e.g. within at least 30%/a, 40%, 50%, 60%, 70%, 80%, 90%, 95%, or 100% activity compared to JMJD6). The RNA sequence of an exemplary C. elegans PSR-1 is shown in SEQ ID NOs: 11, 12, 13. The DNA sequence of an exemplary human ortholog, JMJD6 is shown in SEQ ID NO: 42.

[0086] The term “DJR-1.2” refers to any native PARK7 encoded by the DJ-1 gene or its ortholog. The term encompasses “full-length,” unprocessed DJ-1 as well as any form of DJ-1 that results from processing in the cell, isoforms and variants of DJ-1, e.g., splice variants or allelic variants, functional fragments, and homologs, thereof. The term includes recombinant or naturally occurring form of DJ-1. The term includes DJ-1 and variants thereof that maintain DJ-1 activity (e.g. within at least 30%/a, 40%, 50%, 60%, 70%, 80%, 90%, 95%, or 100% activity compared to DJ-1). The DNA sequence of DJ-1, the exemplary human ortholog of C. elegans DJR-1.2, is shown in SEQ ID NO: 35.

[0087] The term “FZO-1” refers to any native Mitofusin encoded by the MFN-1 and MFN2 genes in humans or their ortholog. The term encompasses “full-length,” unprocessed MFN as well as any form of MFN that results from processing in the cell, isoforms and variants of MFN, e.g., splice variants or allelic variants, functional fragments, and homologs, thereof. The term includes recombinant or naturally occurring form of MFN. The term includes MFN and variants thereof that maintain MFN activity (e.g. within at least 30%/a, 40%, 50%, 60%, 70%, 80%, 90%, 95%, or 100% activity compared to MFN). The DNA sequence of MFN1 and MFN2, the exemplary human orthologs of C. elegans FZO-1, are shown in SEQ ID NO: 37 and SEQ ID NO: 38, respectively.

[0088] The term “MIRO-1” refers to any native RHOT encoded by the RHOT1 or RHOT2 genes or their orthologs. The term encompasses “full-length,” unprocessed RHOT as well as any form of RHOT that results from processing in the cell, isoforms and variants of RHOT, e.g., splice variants or allelic variants, functional fragments, and homologs, thereof. The term includes recombinant or naturally occurring form of RHOT. The term includes RHOT and variants thereof that maintain RHOT activity (e.g. within at least 30%/a, 40%, 50%, 60%, 70%, 80%, 90%, 95%, or 100% activity compared to RHOT). The DNA sequence of RHOT1 and RHOT2, the exemplary human orthologs of C. elegans MIRO-1, are shown in SEQ ID NO: 39 and SEQ ID NO: 40, respectively.

[0089] A critical function of different glia, including astrocyte glia, microglia, RPE glia-like cells, Schwann cells and recently, oligodendrocytes, is to prune, engulf, or take up fragments of neurons. These fragments may include components of synapses and neuron-receptive endings (NREs). Glia properties and glial engulfment (also called pruning) are altered in many neurological diseases.

[0090] The nomenclature of all genes and their human orthologs are as follows: C. elegans PDR-1 (SEQ ID NOs: 1-3) is human Parkin/PARK2 (SEQ ID NO: 24); C. elegans PINK-1 (SEQ ID NO: 6) is human PINK/PARK8 (SEQ ID NO: 25); C. elegans CED-10 (SEQ ID NOs: 4 and 5) is human Rac1 (SEQ ID NO: 26); C. elegans KGB-1 (SEQ ID NO: 7), KGB-2 (SEQ ID NO: 8), and JNK-1 (SEQ ID NOs: 9 and 10) are paralogs of human JNK kinases; C. elegans CED-2 (SEQ ID NO: 16) is human CrkII (SEQ ID NO: 29); C. elegans CED-5 (SEQ ID NO: 17) is human DOCK1 (SEQ ID NO: 30); C. elegans CED-12 (SEQ ID NO: 18) is human ELMO (SEQ ID NOs: 31-33); C. elegans TAT-1 (SEQ ID NO: 19-21) is human ATP8A (SEQ ID NOs: 27 and 28); C. elegans PAT-2 (SEQ ID NO: 14) is human integrin; C. elegans LRK-2 is human LRRK (SEQ ID NO: 34); C. elegans DJR-1.2 is human DJR (SEQ ID NO: 35); C. elegans UCP-4 (SEQ ID NO: 15) is human SLC25A7 (SEQ ID NO: 36); C. elegans FZO-1 is human Mitofusin1 and 2 (SEQ ID NOs: 37 and 38), C. elegans MIRO-1 is human RHOT1 and 2 (SEQ ID NOs: 39 and 40), as shown in Table 1.

TABLE 1
Associated Genes and Identification Numbers

| | | Human | | |
|---|---|---|---|---|
| C. Elegans | SEQ | ortholog/ | SEQ | Database accession |
| (gene name) | ID NO | paralog | ID NO | number |
| PDR-1A | 1 | Parkin/ | 24 | NM_013988.3-gene |
| PDR-1B | 2 | PARK2 | | |
| PDR-1C | 3 | | | |
| CED-10A | 4 | Rac1 | 26 | NM_018890.4-gene |
| CED-10B | 5 | Rac2 | 41 | NM_002872.5-gene |
| PINK-1 | 6 | PINK/ | 25 | NM_032409.3-gene |
| | | PARK8 | | |
| KGB-1 | 7 | MAPK8 | 43 | NM_139049.4-gene |
| KGB-2 | 8 | MAPK9 | 44 | NM_002752.5-gene |
| JNK-1A | 9 | MAPK10 | 45 | NM_138982.4-gene |
| JNK-1B | 10 | | | |
| PSR-1A | 11 | JMJD6 | 42 | NM_001081461.2-gene |
| PSR-1B | 12 | | | |
| PSR-1C | 13 | | | |
| PAT-2 | 14 | integrin | | |
| UCP-4 | 15 | SLC25A7 | 36 | NM_004277.5-gene |
| CED-2 | 16 | CrkII | 29 | NM_005206.5-gene |
| CED-5 | 17 | DOCk1 | 30 | NM_001380.5-gene |
| CED-12 | 18 | ELMO1 | 31 | NM_001206480.2-gene |
| | | ELMO2 | 32 | NM_133171.5-gene |
| | | ELMO3 | 33 | NM_024712.5-gene |
| TAT-1A | 19 | ATP8A | 27 | NM_006095.2-gene and |
| TAT-1B | 20 | | and 28 | NM_016529.6-gene |
| TAT-1C | 21 | | | |
| LRK-1 | | LRRK | 34 | NM_024652.6-gene |
| DJR-1.2 | | DJR | 35 | NM_007262.5-gene |
| FZO-1 | | Mitofusin1 | 37 | NM_033540.3-gene |
| | | Mitofusin2 | 38 | NM_014874.4-gene |
| MIRO-1 | | RHOT1 | 39 | NM_001033566.3-gene |
| | | RHOT2 | 40 | NM_138769.3-gene |

[0091] The nervous system contains two major cell types, glia and neurons. Glia closely associate with neurons, reciprocally monitoring and responding to altered activity. Glia-neuron interactions are critical for nervous system development and function.

[0092] One mechanism by which glia modulate neural development is by engulfing degenerating neurons, projections, and synaptic material. This has been observed across species (Drosophila, mouse, human, zebrafish) in both the CNS and PNS. Glial engulfment of neuron fragments eliminates exuberant projections in development and removes synapses that fail to adequately mature. In both the Central Nervous System (CNS) and Peripheral Nervous System (PNS) of adult animals, multiple glia types across various species clear degenerating neural debris after injury.

[0093] The regulatory logic by which glia regulate engulfment of neuron fragments remains poorly defined. In vitro and in vivo models ranging from Caenorhabditis elegans to mammals have been used to explore glial phagocytic activity, show striking molecular similarities across these systems and species. This alludes to evolutionary conservation of glial function.

[0094] C. elegans AMsh glial cells engulf Neuronal Receptive Ending (NRE) fragments of the neuron of the animal. Thus, glial function is conserved in the nematode and across sense-organ glia. Further, engulfment requires the phospholipid transporter TAT-1/ATP8A, α-integrin PAT-2, and glial phosphatidylserine receptor PSR-1. PSR-1 engages a conserved ternary GEF complex (CED-2/CrkII, CED-5/DOCK1, CED-12/ELMO1) to activate CED-10/Rac1 GTPase. The actin remodeling factor WSP-1/nWASp, a known effector of CED-10, acts in glia to regulate engulfment. Glial engulfment rates are regulated by temperature and track AFD neuron activity. Glial CED-10/Rac1 acts downstream of neuron activity, and CED-10 expression levels dictate NRE engulfment rates. Regulation of CED-10/Rac1 levels regulate the rate of glial pruning.

[0095] Genes that interact with CED-10/Rac1 include PDR-1 in glial pruning. PDR-1/Parkin is linked to disease, and LRK-2, PINK-1 and DJR-1.2 also have been implicated in neurodegenerative disease. These genes are linked to neuronal mitophagy, and regulators of mitochondria include UCP-4, FZO-1, and MIRO-1.

[0096] Perturbation of glial engulfment leads to defects in AFD-NRE shape. The present disclosure shows that glia actively regulate engulfment and glia-dependent engulfment of neuron endings can be dynamically regulated. Thus, glia in other organisms may similarly deploy regulated phagocytosis to tune sensory NREs and synapses, and dynamically modulate adult animal behaviors.

[0097] In one aspect, the present disclosure provides a method for regulating an aberrant glia-directed engulfment and active pruning of Neuronal Receptive Endings (NRE), wherein the method comprises contacting a neuronal and/or a glia cell with an effective amount of a composition effective in modulating at least one gene and/or protein associated with glia-directed engulfment and active pruning of Neuronal Receptive Endings (NRE).

[0098] In some embodiments, the at least one gene and/or protein associated with glia-directed engulfment and active pruning of Neuronal Receptive Endings (NRE) comprises a gene in, and/or a protein expressed by, a neuronal cell, a glia cell, or a combination thereof.

[0099] In some embodiments, the at least one gene and/or protein associated with glia-directed engulfment and active pruning of Neuronal Receptive Endings (NRE) comprises a gene in, and/or a protein expressed by a glia cell.

[0100] In some embodiments, the at least one gene and/or protein associated with glia-directed engulfment and active pruning of Neuronal Receptive Endings (NRE) is selected from: P4-type ATPase/ATP8A, phosphatidyl serine receptor (PSR-1), PAT-2/α-integrin, CED2/CrkII, CED5/DOCK1, CED-12/ELMO, PDR-1/PARKIN (E3 ubiquitin ligase), PTEN-induced putative kinase 1 (PINK1) PINK1/PARK6 (mitochondrial serine threonine kinase), UCP-4/SLC25A27, DJR-1.2/DJR, LRK-1/LRRK2, KGB-1/JNK, KGB-2/JNK, CED-10/Rac1, variants, isoforms thereof, and combinations thereof. Where the name of the protein is indicated, this disclosure includes the gene encoding the protein as named and a homolog or ortholog thereof. Thus, in some embodiments, the at least one gene associated with glia-directed engulfment and active pruning of Neuronal Receptive Endings (NRE) is selected from: P4-type ATPase/ATP8A, phosphatidyl serine receptor (PSR-1), PAT-2/α-integrin, CED2/CrkII, CED5/DOCK1, CED-12/ELMO, PDR-1/PARKIN (E3 ubiquitin ligase), PTEN-induced putative kinase 1 PINK1/PARK6 (mitochondrial serine threonine kinase), UCP-4/SLC25A27, DJR-1.2/DJR, LRK-1/LRRK2, KGB-1/JNK, KGB-2/JNK, CED-10/Rac1, homolog or an ortholog thereof.

[0101] In some embodiments, the at least one gene and/or protein associated with glia-directed engulfment and active pruning of Neuronal Receptive Endings (NRE) is selected from: CED2/CrkII, PDR-1/PARKIN, PTEN-induced putative kinase 1 (PINK1)/PINK/PARK6, UCP-4/SLC25A27, DJR-1.2/DJR, LRK-1/LRRK2, KGB-1/JNK, KGB-2/JNK, CED-10/Rac1, variants, isoforms thereof, and combinations thereof.

[0102] The compositions contemplated by the present disclosure may be effective in modulating the at least one gene, and/or the protein encoded by the at least one gene, associated with glia-directed engulfment and active pruning of Neuronal Receptive Endings (NRE). The compositions disclosed herein may be effective in modulating the at least one protein, an isoform, or a variant thereof associated with glia-directed engulfment and active pruning of Neuronal Receptive Endings (NRE).

[0103] In some embodiments, the composition is effective in modulating the gene encoding the at least one protein, an expression of the at least one protein, an activity of the at least one protein, localization of the at least one protein, a regulator, a downstream effector of the at least one gene and/or the at least one protein, or a combination thereof.

[0104] For example, the present disclosure contemplates compositions effective in regulating the expression of the at least one gene, homolog, or ortholog thereof by (i) modulating the gene at the transcriptional level, for e.g., including but not limited to, by affecting RNA polymerase activity or access to the gene promoter region; (ii) affecting post-transcriptional modulation of the expression of the gene, for e.g., including but not limited to, affecting processes such as RNA splicing, editing, or stability; (iii) affecting epigenetic modulation of gene expression, including but not limited to, such as DNA methylation or histone modification; (iv) inhibiting the expression of the gene, for e.g., including but not limited to, a small RNA molecules (RNAi) composition targeting the transcript of the at least one gene; and/or (iv) precise modification of gene sequence by deleting, or replacing gene segments by gene editing technologies like CRISPR-Cas9.

[0105] In certain embodiments, the modulation of the at least one gene encompasses introduction of the at least one gene in form of a transgene in a neuronal and/or glial cell of an organism or a subject, which may be homologous or heterologous to the organism or the subject, using at least one expression construct comprising the transgene. In an embodiment, the modulation of the at least one gene comprises introduction of the at least one gene in the form of a transgene in a glial cell of the organism or the subject, using at least one expression construct comprising the transgene. An “expression construct” refers to a nucleic acid segment that may possess transcriptional and translational control sequences, such as promoters, enhancers, translational start signals (e.g., ATG or AUG codons), polyadenylation signals, terminators, and the like, and which facilitate the expression of a polypeptide encoded by the transgene in a host cell or organism. Standard techniques which are, in particular, especially suited for the introduction of a gene in the cells of an organism, are available and known to the skilled person for transforming or transfecting an organism's cells with constructs which contain the relevant transgenes.

[0106] One skilled in the art may refer to general reference texts for detailed descriptions of known techniques discussed herein or equivalent techniques. These texts include Ausubel et al., Current Protocols in Molecular Biology, John Wiley and Sons, Inc. (1995); Sambrook et al., Molecular Cloning, A Laboratory Manual (2d ed.), Cold Spring Harbor Press, Cold Spring Harbor, N.Y. (1989); Birren et al., Genome Analysis: A Laboratory Manual, volumes 1 through 4, Cold Spring Harbor Press, Cold Spring Harbor, N.Y. (1997-1999). These texts can, of course, also be referred to in making or using an aspect of the invention.

[0107] In some embodiments, modulating the at least one gene includes but is not limited to increasing transcription of the at least one gene, decreasing transcription of the at least one gene, inhibiting expression of the at least one gene, or activating expression of the at least one gene expression.

[0108] Modulating the expression of the at least one protein comprises effecting an increased expression of the protein or effecting a decreased expression of the protein. Modulating the expression of the at least one protein comprises activating the expression of the protein or inhibiting/blocking the expression of the protein. Nonlimiting exemplary compositions effective in modulating expression of a protein include antisense oligonucleotides and short interfering RNAs (siRNAs) and other inhibitory RNAs specific for the at least one protein. Modulating the activity and/or localization of the at least one protein comprises increasing the activity of the protein or decreasing the activity of the protein. In an exemplary embodiment, modification of protein activity and/or localization comprises changing the actual work done by the protein in a cell. Optionally, as noted herein, the modification of protein activity and/or localization, is for example, by modification of phosphorylation. In some embodiments, the modification of protein activity and/or localization comprises activation and/or inhibition of at least one signaling pathway. In some embodiments, the modulation of the activity and/or localization of the at least one protein comprises modulating an upstream regulator of the activity of the at least one protein in at least one signaling pathway. In some embodiments, the modulation of the activity and/or localization of at least one protein may comprise modulating a downstream effector of the protein in at least one signaling pathway. Nonlimiting exemplary compositions effective in modulating protein activity and/or localization of the at least one protein includes nucleic acids, peptides, peptidomimetics, small molecules, macrolides, anthrapyrazolones, proteins, monoclonal antibodies, pyrimidine diamines, catechols, pharmaceutically acceptable salts thereof, or a combination thereof, specific for the at least one protein.

[0109] In some embodiments, the compositions disclosed herein are capable of blocking, neutralizing, inhibiting, abrogating, reducing and/or interfering with one or more of the activities of, and/or reducing the expression of, the at least one protein (or the expression of nucleic acids encoding the at least one protein). In some embodiments, the composition may decrease the activity and/or expression of the at least one protein by at least 10%, 15%, 20%, 25%, 30%, 35%, 40%, 45%, 50%, 55%, 60%, 65%, 70%, 75%, 80%, 85%, 90%, or even 100% decrease, as compared to the expression and/or activity of the at least one protein that is untreated by the composition.

[0110] In some embodiments, the compositions disclosed herein are capable of activating, increasing and/or enhancing one or more of the activities of, and/or increasing the expression of, the at least one protein (or the expression of nucleic acids encoding the at least one protein). In some embodiments, the composition may increase the activity and/or expression of the at least one protein by at least 10%, 15%, 20%, 25%, 30%, 35%, 40%, 45%, 50%, 55%, 60%, 65%, 70%, 75%, 80%, 85%, 90%, or even 100% increase, as compared to the expression and/or activity of the at least one protein that is untreated by the composition.

[0111] Each of the foregoing methods of modulation can apply to each of the disclosed genes, variants, or orthologs thereof, each of the disclosed proteins, isoforms, mutants, or variants thereof, or a combination thereof. In the disclosed method for regulating aberrant glia-directed engulfment and active pruning of NREs, one, or more than one, gene and/or protein can be modulated in the same or a different way. For example, one or more proteins are activated while a different one or more proteins are inhibited, and yet other one or more different proteins are unaffected; one or more genes are upregulated while a different one or more genes are downregulated, and yet other one or more genes are unaffected; two or more different proteins are activated; two or more different proteins are inhibited; two or more different genes are downregulated; two or more different genes are upregulated; one or more proteins are inhibited and one or more genes are downregulated; one or more proteins are inhibited and one or more genes are upregulated; one or more proteins are activated and one or more genes are upregulated; one or more proteins are activated and one or more genes are downregulated.

[0112] In some embodiments, the composition is effective in modulating the gene encoding the at least one protein, an expression of the at least one protein, an activity of the at least one protein, localization of the at least one protein, a regulator, a downstream effector of the at least one gene and/or the at least one protein, or a combination thereof, in a neuronal cell.

[0113] In some embodiments, the composition is effective in modulating the gene encoding the at least one protein, an expression of the at least one protein, an activity of the at least one protein, localization of the at least one protein, a regulator, a downstream effector of the at least one gene and/or the at least one protein, or a combination thereof, in a glia cell.

[0114] In some embodiments, the composition is selected from a JNK regulator or effector, a Rac1 regulator or effector, a PDR-1/PARKIN regulator or effector, a CED-10 regulator or effector, a PINK regulator or effector, a LRRK regulator or effector, a DJR-1.2 regulator or effector, a KGB-1 regulator or effector, a SLC25A27 regulator or effector, an ATP9A regulator or effector, a CrkII regulator or effector, a DOCK1 regulator or effector, a ELMO regulator or effector, a ATPI3A2 regulator or effector, and combinations thereof.

[0115] In some embodiments, the composition comprises a CED-10/Rac1 regulator or effector, a PDR-1/PARKIN regulator or effector, a PINK1/PINK regulator or effector, a LRK-1/LRRK regulator or effector, a DJR-1.2/DJR regulator or effector, a KGB-1/JNK regulator or effector, a KGB-2/JNK regulator or effector, a UCP-4/SLC25A27 regulator or effector, a CED-2/CrkII regulator or effector, a CED-5/DOCK1 regulator or effector, a CED-12/ELMO regulator or effector, and combinations thereof.

[0116] In some embodiments, the composition is selected from a nucleic acid, a peptide, a peptidomimetic, a small molecule, a macrolide, an anthrapyrazolone, a protein, a monoclonal antibody, a pyrimidine diamine, a catechol, a pharmaceutically acceptable salt thereof, or a combination thereof.

[0117] In some embodiments disclosed herein, the composition is a polynucleic acid comprising DNA or RNA nucleotides.

[0118] In some embodiments disclosed herein, the composition is a peptide, wherein the peptide comprises a strand of naturally occurring amino acids, unnatural amino acids, amino acids which have been modified, or a combination thereof. In some embodiments disclosed herein, the composition is a peptidomimetic, wherein the composition mimics a natural or unnatural peptide in sequence or 3-dimensional space. In some embodiments, for peptides or peptidomimetics, one or more amino acids can comprise D- and/or L-stereochemistry; the amino acids can be modified by post-translational modification; and/or the amino acids can be modified prior to administering, such as by methylation, acetylation, acylation, oxidation, phosphorylation, and/or glycosylation. For example, the peptide or peptidomimetic can be MG-132, having the structure:

[chemical structure]

[0119] In some embodiments disclosed herein, the composition is a macrolide. For example, the macrolide is rapamycin, having the structure:

[chemical structure]

[0120] In some embodiments disclosed herein, the composition is an anthrapyrazolone. For example, the anthrapyrazolone is Sp600125, having the structure:

[chemical structure]

[0121] In some embodiments disclosed herein, the composition is a pyrimidinediamine. For example, the pyrimidinediamine is EHOP-016, having the structure:

[chemical structure]

[0122] In some embodiments disclosed herein, the composition is a catechol. For example, the catechol is apocynin, or acetovanillone, having the structure:

[chemical structure]

[0123] In some embodiments disclosed herein, the composition is a small molecule. A small molecule is defined as a molecule having a molecular weight of less than about 2500 Da, of less than about 2000 Da, of less than about 1500 Da, of less than about 1000 Da, of less than about 750 Da, of less than about 500 Da, or of less than about 350 Da.

[0124] The small molecule can be MG-132 having the structure as disclosed above. The small molecule can be rapamycin, having the structure as disclosed above. The small molecule can be Sp600125, having the structure as disclosed above. The small molecule can be EHOP-016, having the structure as disclosed above. The small molecule can be apocynin, having the structure as disclosed above.

[0125] In some embodiments the composition comprises EHOP-016, Sp600125, MG-132, rapamycin, apocynin, a pharmaceutically acceptable salt thereof, or a combination thereof.

[0126] In some embodiments the composition comprises EHOP-016, Sp600125, MG-132, rapamycin, apocynin, a derivative thereof, a pharmaceutically acceptable salt thereof, or a combination thereof.

[0127] In some embodiments disclosed herein, the composition is a protein associated with glia-directed engulfment and active pruning of Neuronal Receptive Endings (NRE). In an embodiment, the protein is selected from PDR-1/PARKIN (E3 ubiquitin ligase), PTEN-induced putative kinase 1 (PINK1) PINK1/PARK6 (mitochondrial serine threonine kinase), UCP-4/SLC25A27, DJR-1.2/DJR, LRK-1/LRRK2, KGB-1/JNK, KGB-2/JNK, isoforms, variants, and combinations thereof.

[0128] In some embodiments, the composition comprises anti-sense oligonucleotides, small interfering RNAs (siRNAs), short hairpin RNAs (shRNAs), peptide nucleic acids (PNAs), or ribozymes targeting the transcript of the at least one protein associated with glia-directed engulfment and active pruning of Neuronal Receptive Endings (NRE). In some embodiments, the at least one protein is selected from PDR-1/PARKIN (E3 ubiquitin ligase), PTEN-induced putative kinase 1 PINK1/PARK6 (mitochondrial serine threonine kinase), UCP-4/SLC25A27, DJR-1.2/DJR, LRK-1/LRRK2, KGB-1/JNK, KGB-2/JNK and combinations thereof.

[0129] In some embodiments, the composition further comprises a pharmaceutically acceptable carrier or excipient, to form a pharmaceutical composition. A “pharmaceutical composition” refers to a formulation of a compound of the disclosure and a medium generally accepted in the art for the delivery of the compound to mammals, e.g., humans. Such a medium includes all pharmaceutically acceptable carriers, diluents, or excipients thereof.

[0130] In some embodiments, the method disclosed herein further comprises an agent for enhanced delivery of the composition to the neuronal and/or glia cell. For example, the agent is selected from a targeting ligand, a lipid-based nanoparticle, a polymeric nanoparticle, a cationic polymer, a cell-penetrating peptide, a viral vector, an exosome, and a synthetic nanovesicle. Such agents enhance delivery by increasing the amount of the composition which contacts the neuronal and/or glial cell.

[0131] In some embodiments, the composition is effective in editing the gene of the at least one protein associated with glia-directed engulfment and active pruning of Neuronal Receptive Endings (NRE), and wherein the composition comprises: a guide RNA specifically designed to guide a CRISPR/Cas9 complex to the gene of the at least one protein associated with glia-directed engulfment and active pruning of Neuronal Receptive Endings (NRE) and a Cas9 protein or a nucleic acid encoding the Cas9 protein. In some embodiments, the gene is selected from PDR-1/PARKIN (E3 ubiquitin ligase), PTEN-induced putative kinase 1 (PINK1) PINK1/PARK6 (mitochondrial serine threonine kinase), UCP-4/SLC25A27, DJR-1.2/DJR, LRK-1/LRRK2, KGB-1/JNK, KGB-2/JNK and combinations thereof.

[0132] In some embodiments, the composition is effective in modulating the gene encoding the at least one protein, an expression of the at least one protein, an activity of the at least one protein, localization of the at least one protein, a regulator, a downstream effector of the at least one gene and/or the at least one protein, or a combination thereof, in a neuronal cell.

[0133] In some embodiments the composition modulates a protein in a neuronal cell, the protein comprises P4-type ATPase/ATP8A, a variant or an isoform thereof.

[0134] In some embodiments, the at least one gene and/or protein is selected from PSR-1, PAT-2/α-integrin, PINK-1/PINK, PDR-1/PARKIN, LRK-1/LRRK2, DJR-1.2/DJR, CED-10/RAC1, KGB-1/JNK, KGB-2/JNK, UCP-4, a mutant thereof, an isoform thereof, and combinations thereof.

[0135] In some embodiments, the at least one gene and/or protein is selected from PINK-1/PINK, PDR-1/PARKIN, CED-10/RAC1, KGB-1/JNK, KGB-2/JNK, UCP-4/SLC25A27, a mutant thereof, an isoform thereof, and combinations thereof.

[0136] In some embodiments, the at least one gene and/or protein is PDR-1/PARKIN, a truncated PDR-1/PARKIN, or isoforms thereof.

[0137] In some embodiments, the truncated PDR-1/PARKIN comprises a PDR-1/PARKIN protein lacking a Ubl domain.

[0138] In some embodiments, the composition is effective in restoring expression of a PDR-1/PARKIN comprising the Ubl domain in the glial cell.

[0139] In some embodiments, the composition comprises a modulator of the activity of Janus N-terminal Kinase (JNK) or an isoform thereof, and wherein the JNK or the isoform thereof is a downstream effector of PDR-1/PARKIN.

[0140] In some embodiments, the composition is effective in modulating the expression levels, localization, or the activity of Rac1 GTPase (CED-10/RAC1), and wherein the Rac1 GTPase (CED-10/RAC1) is acting with PDR-1/PARKIN.

[0141] In some embodiments, the composition is effective in modulating the expression of the mitochondrial uncoupling protein UCP-4/SLC25A7 in the glia cell, wherein the composition comprises an expression vector encoding UCP-4/SLC25A7 or a modulator thereof, and wherein the composition is effective in modulating PDR-1/PARKIN.

[0142] In some embodiments, the method is effective in modulating the timing of the glia-mediated NRE engulfment, and wherein the method is effective in preventing pre-mature onset of glia-mediated NRE engulfment, or wherein the method is effective in preventing delayed onset of glia-mediated NRE engulfment.

[0143] In some embodiments, the at least one gene and/or protein is PINK-1/PINK, a mutated PINK-1/PINK protein, or a combination thereof.

[0144] In some embodiments, the composition is effective in restoring a serine/threonine kinase function of PINK-1 protein.

[0145] In some embodiments, the composition comprises a regulator of the activity of Janus N-terminal Kinase (JNK), or an isoform or ortholog thereof, and wherein the Janus N-terminal Kinase (JNK), or the isoform or ortholog thereof, is a modulator of PINK-1.

[0146] In some embodiments, the composition is effective in regulating expression levels, localization, or activity of Rac1 GTPase (CED-10/RAC1), and wherein Rac1 GTPase (CED-10/RAC1) is acting with PINK-1.

[0147] In some embodiments, the method is effective in regulating neuronal function, neuronal shape, an alteration in the rate of glia-directed engulfment and active pruning of Neuronal Receptive Endings (NRE), timing of glia-directed engulfment and active pruning of Neuronal Receptive Endings (NRE), or a combination thereof.

[0148] In some embodiments, the method is effective in treating a neurodegenerative disorder or disease in a subject in need thereof. For example, the neurodegenerative disorder or disease is selected from Parkinson's Disease (PD), Alzheimer's disease, Autism Spectrum Disorders, leprosy, and gliomas. In some embodiments, the neurodegenerative disorder or disease is Parkinson's Disease (PD).

[0149] In the embodiments disclosed herein, the subject is a mammal. In an exemplary embodiment, the subject is human, and the composition is effective in modulating at least one gene and/or protein encoded by the gene associated with glia-directed engulfment and active pruning of Neuronal Receptive Endings (NRE). In some embodiments, the at least one gene is the human ortholog of genes selected from: P4-type ATPase/ATP8A, phosphatidyl serine receptor (PSR-1), PAT-2/α-integrin, CED2/CrkII, CED5/DOCK1, CED-12/ELMO, PDR-1/PARKIN (E3 ubiquitin ligase), PTEN-induced putative kinase 1 (PINK1) PINK1/PARK6 (mitochondrial serine threonine kinase), UCP-4/SLC25A27, DJR-1.2/DJR, LRK-1/LRRK2, KGB-1/JNK, KGB-2/JNK, CED-10/Rac1, and combinations thereof.

[0150] In some embodiments, the at least one gene is the human ortholog of genes selected from: PDR-1/PARKIN, PTEN-induced putative kinase 1 (PINK1) PINK1/PARK6, UCP-4/SLC25A27, DJR-1.2/DJR, LRK-1/LRRK2, KGB-1/JNK, KGB-2/JNK, CED-10/Rac1, and combinations thereof.

[0151] In another aspect, the disclosure provides a method of treating a neurodegenerative disease in a subject in need thereof, the method comprising administering to the subject an effective amount of a therapeutic composition effective in modulating at least one gene and/or protein associated with glia-directed active pruning of Neuronal Receptive Endings (NRE).

[0152] In some embodiments, the therapeutic composition comprises the composition or pharmaceutical composition as disclosed herein.

[0153] The compositions disclosed herein can be administered alone or can be co-administered to the subject. Co-administration is meant to include simultaneous or sequential administration of the composition in combination with another substance, e.g., a composition as disclosed herein, another active substance, a carrier, a diluent, a stabilizing agent, an emulsifier, a vehicle, and the like. Thus, the compositions can also be combined, when desired, with other active substances (e.g., at least one other therapeutic agent or composition), an agent to reduce metabolic degradation, an agent to increase stability, an agent to enhance delivery (e.g. a liquid medium), or components to provide sustained release and/or comfort. In an embodiment, the compositions disclosed herein are administered with at least one other active agent known to be useful in treating a neurodegenerative disease (e.g., Parkinson's disease, such as levodopa, dopamine agonists (e.g., bromocriptine, pergolide, pramipexole, ropinirole, piribedil, cabergoline, apomorphine, lisuride), MAO-B inhibitors (e.g. selegiline or rasagiline), amantadine, anticholinergics, antipsychotics (e.g. clozapine), cholinesterase inhibitors, modafinil, or non-steroidal anti-inflammatory drugs).

[0154] In some embodiments, co-administration includes administering a second active agent within 0.5, 1, 2, 4, 6, 8, 10, 12, 16, 20, or 24 hours, or 2 days, 3 days, 4 days, 7 days, 14 days, 30 days, 60 days, or 90 days of administering the first active agent. Co-administration includes administering two active agents simultaneously, approximately simultaneously (e.g., within about 1, 5, 10, 15, 20, or 30 minutes of each other), or sequentially in any order. In some embodiments, co-administration can be accomplished by co-formulation, i.e., preparing a single pharmaceutical composition including both active agents/compositions. In other embodiments, the active agents or compositions can be formulated separately and administered simultaneously, approximately simultaneously, or separately. In some embodiments, the active agents and/or compositions may be linked or conjugated to one another.

[0155] The compositions of the present disclosure can also be delivered as microspheres for slow release in the body. For example, microspheres can be administered by the intradermal injection of composition-containing microspheres, which slowly release subcutaneously (see Rao, J. Biomater Sci. Polym. Ed. 7:623-645, 1995); as biodegradable and injectable gel formulations (see, e.g., Gao Pharm. Res. 12:857-863, 1995); or as microspheres for oral administration (see, e.g., Eyles, J. Pharm. Pharmacol. 49:669-674, 1997). In some embodiments, the formulations of the compositions of the present invention can be delivered by the use of liposomes which fuse with the cellular membrane or are endocytosed, i.e., by employing receptor ligands attached to the liposome, that bind to surface membrane protein receptors of the cell resulting in endocytosis. By using liposomes, particularly where the liposome surface carries receptor ligands specific for target cells, or are otherwise preferentially directed to a specific organ, the delivery of the compositions of the present disclosure can be focused to the target cells in vivo. (See, e.g., Al-Muhammed, J. Microencapsul. 13:293-306, 1996; Chonn, Curr. Opin. Biotechnol. 6:698-708, 1995; Ostro, Am. J. Hosp. Pharm. 46:1576-1587, 1989). The compositions of the present invention can also be delivered as nanoparticles.

[0156] Administering a composition as described herein, or a pharmaceutically acceptable salt thereof, to a subject comprises any suitable delivery method. Administering a composition described herein, or a pharmaceutically acceptable salt thereof, to a subject includes administering the composition described herein, or the pharmaceutically acceptable salt thereof, topically, enterally, parenterally, transdermally, transmucosally, via inhalation, intracisternally, epidurally, intravaginally, intravenously, intramuscularly, subcutaneously, intradermally or intravitreally to the subject, mammal, or human.

[0157] Thus, a composition, or pharmaceutically acceptable salt thereof, as described herein, may be systemically administered, e.g., orally, in combination with a pharmaceutically acceptable vehicle or carrier such as an inert diluent or an assimilable edible carrier. The composition may be enclosed in hard or soft shell gelatin capsules, may be compressed into tablets, or may be incorporated directly with the food of the subject's diet. For oral therapeutic administration, the composition or pharmaceutically acceptable salt thereof as described herein may be combined with one or more excipients and used in the form of ingestible tablets, buccal tablets, troches, capsules, elixirs, suspensions, syrups, or wafers, and the like. Such compositions and preparations should contain at least about 0.1%, 1%, 2%, 5%, 10%, 15%, 20%, 25%, 30%, 40%, 50%, 60%, 70%, 80%, or 90% of active compound. The percentage of the compositions and preparations may be varied based on the activity of the composition; the age, size, weight, health of the subject; and the mode of administration. The percentage of the compositions and preparations may be between about 2 to about 60% of the weight of a given unit dosage form. The amount of active compound in such therapeutically useful compositions can be such that an effective dosage level will be obtained.

[0158] The disclosed method can include a kit comprising a composition or pharmaceutically acceptable salt thereof as described herein and instructional material which can describe administering the composition or pharmaceutically acceptable salt thereof as described herein to a cell or a subject.

[0159] In other aspects, the disclosure provides a method for treating Parkinson's Disease in a subject in need thereof, the method comprising administering to the subject a therapeutically effective amount of a composition effective in modulating at least one gene and/or protein associated with Parkinson's Disease (PD), wherein the gene and/or protein is expressed in a glia cell. In some embodiments, the at least one gene and/or protein is associated with glia-directed engulfment and active pruning of Neuronal Receptive Endings (NRE). In some embodiments, the gene and/or protein is selected from PINK-1/PINK, PDR-1/PARKIN, LRK-1/LRRK2, DJR-1.2/DJR, CED-10/Rac1, KGB/JNK, UCP-4, SLC25A7, a variant, an isoform thereof, and combinations thereof.

[0160] In some embodiments, the PD is associated with a loss of function mutation of the at least one gene, wherein the loss of function mutation is homozygous or heterozygous. In some embodiments, the PD is associated with: (i) an increased function of the at least one gene and/or protein, (ii) a decreased function of the at least one gene and/or protein, or (iii) a combination of decreased function of the at least one gene and/or protein and an increased function of a different one or more gene and/or protein.

[0161] In some embodiments, the composition is effective in modulating the gene encoding the at least one protein, an expression of the at least one protein, an activity of the at least one protein, localization of the at least one protein, a regulator, a downstream effector of the at least one gene and/or the at least one protein, or a combination thereof.

[0162] In some embodiments, the composition is effective in modulating the activity of the at least one protein.

[0163] In some embodiments, the composition is effective in modulating at least one gene encoding the at least one protein.

[0164] In yet another aspect, the disclosure provides a method for the treatment of Parkinson's disease comprising administering to a subject in need thereof a composition effective in modulating the activity of Janus N-terminal Kinase (JNK) or an isoform thereof, wherein the composition is targeted for delivery to glia cells, and wherein the subject harbors a loss of function gene mutation in PARKIN or PINK1. In some embodiments, the loss of function gene mutation is heterozygous. In some embodiments, the loss of function gene mutation is homozygous. In some embodiments, the composition is selected from an siRNA directed against JNK or an isoform thereof, an artificial microRNA directed against JNK or an isoform thereof, an antisense molecule directed against JNK or an isoform thereof, a ribozyme directed against JNK, a peptide directed against JNK, a peptidomimetic directed against JNK or a small molecule directed against JNK. In some embodiments, the composition further comprises an agent for enhanced and/or targeted delivery of the composition to the glia. Nonlimiting exemplary agents include a targeting ligand specific for a glial cell, a lipid-based nanoparticle, a polymeric nanoparticle, a cationic polymer, cell-penetrating peptide, viral vector, an exosome, and a synthetic nanovesicle, and combinations thereof.

[0165] In a further embodiment, the disclosure provides a method for the treatment of Parkinson's disease comprising administering to the subject in need thereof a composition effective in modulating CED-10/Rac-1 or an isoform thereof, wherein the composition is targeted for delivery to the glia, and wherein the subject harbors a loss of function gene mutation in PARKIN or PINK1. In some embodiments, the loss of function mutation is homozygous or heterozygous.

[0166] In some embodiments, modulating the CED-10/Rac-1 or an isoform thereof comprises modulating the expression levels, localization, or the activity of Rac1 GTPase (CED-10/RAC1). In some embodiments, the composition further comprises an agent for enhanced and/or targeted delivery of the composition to the glia.

### EXAMPLES

[0167] The following examples are set forth to provide those of ordinary skill in the art with a complete disclosure and description of how to make and use the present invention. The following examples are not intended to limit the scope of the invention, nor are they intended to represent the entire scope of experiments performed.

### Example 1

### General Materials and Methods

### Strains

[0168] Strains were sourced from (a) the CGC, (b) the International C. elegans Gene Knockout Consortium (C. elegans Gene Knockout Facility at the Oklahoma Medical Research Foundation and the C. elegans Reverse Genetics Core Facility at the University of British Columbia), and (c) National BioResource Project (NBRP), Japan.

### Plasmids

[0169] PDR-1/PARK constructs: cDNA for pdr-1 isoform A was isolated via PCR from a mixed stage C. elegans cDNA librarypAS. The cDNA was inserted into the parent vector pAS464 using Gibson Assembly® to generate ASJ187/pSAR47 (P_{F53F4.13}:mKate2:PDR-1) (SEQ ID NO: 56). (FIG. 11). Amplified pdr-1 isoform A was also inserted into the parent vector pAS322 using Xma1/Nhe1 to generate ASJ72/pSAR19 (P_{srtx-1-b}:PDR-1:SL2:mCherry) (SEQ ID NO: 55) and ASJ55/pSAR17 ((FIG. 5). Human PARK2 sequences were inserted into ASJ465 using Xma/Nhe to generate ASJ467/pET7 (P_{F53F4.13}:hPARK2:SL2:mCherry.

[0170] PINK-1 constructs: cDNA for pink-1 was PCR amplified from a mixed-stage C. elegans cDNA library and cloned into pAS548 (P_{F53F4.13}:SL2:mKate2) using Xma1/Xba1 sites to generate ASJ333/pET2 (P_{F53F4.13}:PINK-1:SL2:mKate2) (SEQ ID NO: 48). Amplified pink-1 was also cloned in ASJ40/pMP7 (P_{srtx-1-b}:PINK-1:SL2:mKate2) (SEQ ID NO: 57) using Gibson Assembly to generate ASJ332/pET1 (P_{srtx-1-b}:PINK-1:SL2:mKate2) (SEQ ID NO: 57). (FIG. 4)

[0171] CED-10 plasmids: CED-10B isoform cDNA was isolated from a mixed stage cDNA library by PCR amplification with primers containing XmaI and NheI restriction enzyme sites and directionally ligated into pAS465 (P_{F53F4.13}: SL2: mCherry) to generate pAS275 plasmid (SEQ ID NO: 46). (FIGS. 11 and 19).

[0172] Recombineered fosmids: The following fosmids with GFP recombineered in-frame in the coding sequence were obtained from the MPI-TransgeneOme Project: gcy-8 (Clone ID: 02097061181003035 C08), and gcy-23 (Clone ID: 523378417130642 E08). (FIG. 1-23). Stable integrated transgenes of these were used to quantify number of engulfed fragments in glia.

[0173] UCP-4 constructs: UCP-4 cDNA from a mixed stage library was amplified by PCR and inserted in pAS465 to generate ASJ139/pSAR39.

[0174] PCR fragments containing 35 bp overlaps were generated from plasmids to generate amplicons with P_{F53F4.13}, GFP, CED-10, and UNC-54 3′ UTR. These amplicons were melted and re-annealed according to published protocols, and along with a crRNA specific to the MOSI transposon sequence injected into Day 1 adult worms. Transformants were screened via GFP fluorescence and confirmed with PCR and sequencing.

TABLE 2
Constructs

| | SEQ |
|---|---|
| Constructs | ID NO |
| pAS275 P53 CED-10B SL2 mCh | 46 |
| pAS516 pF53 GFP | 47 |
| ASJ 333 pET2 pF53F4.13 PINK-1 SL2 mKate2 | 48 |
| ASJ467 pET7 pF53-hPARK2-SL2-mCherry | 49 |
| pSAR1 F53F4.13 Sph-Not-Xma-ced-12 cDNA-Nhe-pSM- | 50 |
| SL2-cherry | |
| ASJ22 pSAR6 BamHI psr1 NheI SL2 mCh | 51 |
| ASJ29 pSAR8 pF53 XbaI psr1 AgeI mSc | 52 |
| ASJ72 pSAR19 pSAR20 SphI pSRTXB BamHI PDR-1 cDNA | 53 |
| SL2 mCh | |
| ASJ114 pSAR35 SphI pSRTX XmaI TAT-1a | 54 |
| ASJ139 pSAR39 pF53 XmaI ucp-4 cDNA NheI SL2 mCh | 55 |
| ASJ187 pSAR47 pF53 mKate2 PDR-1 | 56 |
| ASJ 332 pET1 Psrtx1-b pink1 SL2 mKate2 | 57 |
| pAS322 Psrtx-1b:pSM | |
| pAS464 Pf53F4.13:GFP | |
| pAS465 PF53F4.13:SL2:mCherry | |
| pAS548 PF53F4.13:SL2:mKate2 | |
| ASJ55 pSAR17 PF53F4.13:PDR-1:SL2: mCherry | |
| ASJ11 pSAR1 PF53F4.13:CED-12:SL2:mCherry | |

C. elegans Methods

[0175] C. elegans were cultured as known to one of skill in the art. Bristol N2 strain was used as wild type. For all experiments, animals were raised at 20° C. for at least two generations without starvation, picked as L4 larvae onto fresh plate, and assayed 1 day later unless otherwise noted. For analysis of glial engulfment, animals were crossed to the strain dnals13, an integrated transgene bearing gcy-23: GFP recombineered fosmid outcrossed to Bristol N2 four times. To control environmental variations, worms were raised from egg-lay in a humidity and temperature-controlled environment until imaging. Worms were staged at the L4 stage using vulval anatomy. Day 1 adult animals were staged at the L4 stage and then grown for approximately 24 more hours (unless otherwise stated) in the controlled environment. Worms were imaged and glial engulfment was analyzed as described in the methods below.

[0176] Germline transformations by microinjection to generate unstable extrachromosomal array transgenes were carried out using standard protocols known to those having ordinary skill in the art. Integration of extrachromosomal arrays was performed using UV+trimethyl psoralen.

[0177] Generation of CRISPR/Cas9 based mutations. For ligase dead pdr-1 allele: Using published protocols for the Alt-R CRISPR system, pdr-1 specific crRNAs, a repair template with 40 bp overhangs, rol-6 plasmid, and Cas9 mixture were injected into Day 1 adult worms. From the F1 generation, 12 rollers were picked to individual plates from each of the 2 highest transforming plates. 8 F2 animals from each of the 24 plates were lysed and the edit was confirmed with sequencing. For generation of pdr-1 deletion allele: Using a similar method to above, two crRNAs that bind to sequences flanking the pdr-1 genomic locus were used. Transformants were screened for successful deletion via PCR and confirmed via sequencing (FIGS. 5-10, 12, 13, 15, 16, 18, 19-23).

### Microscopy, Imaging, and Processing-Method 1

[0178] Animals were immobilized using either 2 mM tetramizole or 100 nm polystyrene beads. Images were collected on a Deltavision® Elite RoHS wide-field deconvolution system with Ultimate Focus® (GE), a PlanApo 60_/1.42 NA or OLY 100_/1.40 NA oil-immersion objective and a DV Elite CMOS Camera. Super-resolution microscopy images were collected on the Leica® VT-iSIM microscope or the Leica® SP8 confocal with Lightning. Images were processed on ImageJ, Adobe Photoshop® CC, or Adobe Illustrator® CC. Binning categories for population analyses were based on preliminary analyses of population distribution of puncta numbers/animal in wild type, and mutants with excess puncta (tax-2) or reduced puncta mutants (ced-10, psr-1). Preliminary analyses of these strains suggested that the bin intervals (0, 1-9, or 10+ puncta) are the most robust, conservative, and rapid assessment of phenotypes. Higher than 10 puncta/cell were not readily resolved without post-processing and therefore binned together in population scores. Some genotypes were selected for further post-hoc single-cell puncta quantification analyses. For this, glia puncta numbers were quantified using Analyze Particles function in ImageJ on deconvolved images. Individual puncta size measurements were done on yz orthogonal rendering of optical sections using 3D objects counter plug-in in ImageJ.

### Microscopy, Imaging, and Processing—Method 2

[0179] Worms were immobilized with 40 mM sodium azide. Images were collected on a Deltavision® Elite RoHS wide-field deconvolution system with Ultimate Focus® (GE), a PlanApo 60×/1.42 NA or OLY 100×/1.40 NA oil-immersion objective, and a DV Elite CMOS Camera. Images of the AFD puncta in the region of the AMsh were taken at 100× using FITC with 100% transmission and 0.0405 ms exposure with a reference image taken at 5% POL in the middle of the sample. For worms expressing an extrachromosomal array tagged with mCherry, images were also taken using an A594 filter with 0.02 ms exposure to ensure expression of the array in the cell of interest. Images were then deconvolved and cropped to 1024×1024 in the area of interest. Next, images were processed using FIJI®. All images were converted to 8-bit and brightness and contrast were set with a minimum of 0 and a maximum of 50. Next, a rectangle is drawn around the region of the AMsh adjacent to, but not including, the AFD cell body and excluding any area along the AFD process. Next, the image is cropped to this region, and the tool “3D Objects Counter” is run with the following settings: threshold=35; size min.=5 max.=7225848; exclude objects side. This number of puncta is then verified by eye and recorded.

### Electron Microscopy

[0180] Adult hermaphrodites were fixed in 0.8% glutaraldehyde-0.8% osmium tetroxide-0.1 M cacodylate buffer (pH 7.4) for 1 hr at 4° C. in the dark, and then quickly rinsed several times with 0.1 M cacodylate buffer. Animal heads were decapitated and fixed in 1% osmium tetroxide-0.1 M cacodylate buffer overnight at 4° C., quickly rinsed several times in 0.1 M cacodylate buffer, and dehydrated through a graded ethanol series. The samples were then embedded in Eponate 12 resin and polymerized overnight in a 60° C. oven. 70 nm ultrathin serial sections were collected onto pioloform-coated slot grids from the anterior tip of the animal to a distance of approximately 7 mm. Sections were examined on a JEOL 1400 TEM at an accelerating voltage of 120 kV. Images were acquired with a Gatan® Rio 4k_4k detector. Microvilli size measurements were done with ImageJ Measure Function on electron micrograph thin sections.

### Statistical Analyses—Method 1

[0181] Population puncta scoring was statistically analyzed using Fisher's exact statistical test in GraphPad Prism® 8. Puncta images were quantified using Analyze Particles function in Image J and analyzed with a one-Way ANOVA® with multiple-comparison test in GraphPad Prism® 8.

### Statistical Analyses—Method 2

[0182] Data and statistics were either graphed and analyzed using Prism9 or by using R. Statistical analysis in R was conducted using the open-source data visualization package ggplot2. Data is represented in a boxplot with each point representing the number of puncta engulfed within the cell body of one AMsh glia in a single worm. Dots represent the biological replicate in which the individual worm was imaged unless otherwise specified to represent genotype. Statistical analysis between groups shows a comparison of means using the nonparametric test of either the Wilcox rank sum test for two groups or a Kruskal Wallis test if there are more than two groups.

### Chemogenetic Silencing and RNAi

[0183] For chemogenetic silencing assays, 10 mM histamine (Sigma®) was added to NGM agar plates. L4 larval stage transgenic worms expressing HisCl1 in AFD were grown for 24 hrs. on either normal or histamine plates and assayed as day 1 adults. Plasmids expressing double-stranded RNA were obtained from the Ahringer Library. The L4440 empty vector was used as negative control. RNAi was performed by feeding synchronized L1 animals RNAi bacteria. L4 larva were moved to a fresh plate with RNAi bacteria and scored 24 hr later for glial puncta (nsIs483) or AFD-NRE defects (nsIs645).

RT-PCR, qPCR

[0184] Primers for RT-PCR were designed manually. Total RNA from bleach synchronized Day 1 adults was isolated, normalized at 1 μg between samples, and reverse transcribed into cDNA using ThermoFisher cDNA Reverse Transcription Kit. PCR was performed on cDNA libraries and analyzed by gel electrophoresis. Specific bands were isolated via cutting and DNA was isolated by gel extraction. The same forward primer used in the RT-PCR was used to sequence each band. qPCR primers were designed using the ThermoFisher TaqMan® Real-Time PCR tool. RNA was extracted and converted to cDNA as described above. qPCR was performed on an ABI® QuantStudio® 5 Real-Time PCR system and analyzed in the ABI® QuantStudio® 5 software.

### Example 2

C. elegans Glia Engulf Fragments of the AFD-NRE

[0185] Glia of the nematode C. elegans share molecular, morphological, and functional features with vertebrate sense-organ glia and astrocytes. AMsh glia-AFD neuron pair is a tractable experimental platform to define molecular mechanisms of single glia-neuron interactions. The AFD-NRE comprises ~45 actin-based microvilli and a single microtubule-based cilium that are embedded in the AMsh glial cell. An adherens junction between the AFD-NRE base and the AMsh glial cell isolates this glia-NRE compartment.

[0186] Upon imaging fluorescently labeled AFD-NREs in transgenic animal strains, labeled fragments were consistently observed to be disconnected from the neuron. Reconstructions-based FIB-SEM serial section data also revealed AFD-NRE fragments disconnected from the rest of the AFD neuron. Further examination using two-color imaging revealed that many of these fragments reside within the AMsh glial process and cell body. To confirm that these glial puncta do not reflect spurious reporter protein misexpression in glia but rather derive from the AFD, AFD neurons were ablated early in larval development and puncta on the first day of adulthood was sought. Upon ablation of one of the two bilateral AFD neurons by laser microsurgery in first larval stage (L1) animals, fragment formation was blocked on the operated side, but not on the unoperated side, or in mock-ablated animals. Similar results were seen with stochastic genetic ablation of AFD using the pro-apoptotic BH3-domain protein EGL-1, expressed using an embryonic AFD-specific promoter. Therefore, AMsh glia engulf fragments of the AFD-NRE in C. elegans.

[0187] 3D super-resolution microscopy studies revealed that the average size of AFD-derived glial puncta is 541±145 nm along their long (yz) axis. These fragments are an order of magnitude smaller than other exophers extruded from neurons exposed to cellular stress (~3.8 mm in diameter) and larger than ciliary extracellular vesicles (~150 nm). This size is of the same order of magnitude as the sizes of individual AFD-NRE microvilli or cilia as measured by electron microscopy.

### Example 3

### AMsh Glia Engulfment of AFD-NREs Occurs in Adults

[0188] Engulfment of neuronal fragments by glia has been suggested to refine neuronal circuit connectivity during neural development. Post development, glial engulfment is thought to regulate animal behaviors and memory. To determine when C. elegans AMsh glia initiate engulfment of AFD-NRE fragments, engulfed NRE puncta at different life stages were counted. These puncta are rarely found in embryos or early larval stages, but are easily detected in L4 larvae and increase in numbers during adulthood. Thus, consistent with L1 laser ablation studies, engulfment of AFD-NREs by glia occurs after development of the AFD-NRE is largely complete.

[0189] Approximately 65% of 1-day old adult animals expressing the AFD-NRE-specific markers including gcy-8: GFP or gcy-23: GFP raised at 20° C. have AMsh glia containing >10 puncta, and another ~32% of animals have 1-9 puncta/glia (n=171). The AMsh glial cell of 1-day-old adults has on average 14±1 puncta (n=78). Using time-lapse microscopy, individual puncta separate from the NRE at a frequency of 0.8±0.3 events/min and travel at 1.05±0.1 mm/s down the glial process towards the cell body, consistent with motor-protein-dependent retrograde trafficking (quantifications of videos from n=5 animals). Finally, age-matched animals raised at different cultivation temperatures differ in glia puncta accumulation.

### Example 4

### Nuclear Localization Regulates Pruning

[0190] A nuclear role for PDR-1 in glia or in regulation of glial pruning has not been previously described. Pruning is inhibited when PDR-1 becomes localized into the glial nucleus. Restricting PDR-1 out of the nucleus does not alter pruning rates. Increased levels of CED-10/Rac1 translocate PDR-1/Parkin to glial nuclei. Altered levels of CED-10/Rac1 regulate rates of pruning. Thus, dependent regulation of PDR-1 and CED-10 regulates PDR-1 localization to the nucleus and glial pruning. (FIG. 11B).

### Example 5

### Effects of Exposure to Drugs on Glial Pruning

[0191] 4 mL standard C. elegans nematode growth medium (NGM) was aliquoted into 35 mm Petri dishes and stored at 4 degrees Celsius. Plates were warmed to room temperature and seeded with 100 μL of OP50 and dried overnight. Plates were then spotted with 100 μL of diluted SP600125 (in DMSO), Apocynin (in DMSO), or EHop-016 (in DMSO) for a final concentration of 0.5% or 1% DMSO (as labeled) and a final concentration of the treatment drug of 50 μM (unless otherwise specified). Spot treatment was allowed to dry before L1 staged C. elegans were transferred onto the plate. Worms were then imaged approximately 2 days later. Worms were staged at this time by vulval anatomy, body size, and the presence or absence of eggs. These stages were noted for the worms and then data was subset to compare the effects of drugs at different stages. At this time, worms were imaged, and glial engulfment levels were analyzed.

[0192] Results of these drug treatments are shown in FIGS. 16, 20, 21, and 23. Briefly, genetic loss of CED-10/Rac1 or JNK, or their activity modulation by drug treatments, can modify glial engulfment of wild type, as well as pdr-1 and pink-1 mutations. Thus, modifying Rac1 or JNK activity is relevant to mitigating glial engulfment defects seen in animal mutants for PD-associated genes.

### CED-10/Rac1

[0193] Drugs which inhibit CED-10/Rac1 function, without losing gene product, increase pruning similar to loss of the pdr-1 gene. For example, exposure to 10 μM of the drug EHOP-016 increased pruning in wild type and pdr-1; pink-1 double mutant animals (FIG. 21C). Unlike mutation in ced-10/Rac1 or its inhibitor Apocynin, it did not suppress defects seen in pdr-1 single or pdr-1; pink-1 double mutant animals, as judged by the number of engulfed fragments in glia in each case, as seen in FIG. 21C. The variability in response properties of different methods of perturbing Rac1 activity suggests that specific regulation kinetics are required. Thus, manipulation of CED-10/Rac1 can alter pruning rates, and specific perturbations can exaggerate or suppress defects in glial pruning from loss of PDR-1.

[0194] While illustrative embodiments have been illustrated and described, it will be appreciated that various changes can be made therein without departing from the spirit and scope of the invention.

1. A method for regulating an aberrant glia-directed engulfment and active pruning of Neuronal Receptive Endings (NRE), the method comprising:
contacting a neuronal and/or a glia cell with an effective amount of a composition effective in modulating at least one gene and/or protein associated with glia-directed engulfment and active pruning of Neuronal Receptive Endings (NRE).

2. The method of claim 1, wherein the at least one gene and/or protein associated with glia-directed engulfment and active pruning of Neuronal Receptive Endings (NRE) comprises a gene in, and/or a protein expressed by, a neuronal cell, a glia cell, or a combination thereof.

3. The method of claim 1, wherein the at least one gene and/or protein associated with glia-directed engulfment and active pruning of Neuronal Receptive Endings (NRE) is selected from: P4-type ATPase/ATP8A, phosphatidyl serine receptor (PSR-1), PAT-2/α-integrin, CED2/CrkII, CED5/DOCK1, CED-12/ELMO, PDR-1/PARKIN (E3 ubiquitin ligase), PTEN-induced putative kinase 1 (PINK1) PINK1/PARK6 (mitochondrial serine threonine kinase), UCP-4/SLC25A27, DJR-1.2/DJR, LRK-1/LRRK2, KGB-1/JNK, KGB-2/JNK and combinations thereof.

4. (canceled)

5. The method of claim 1, wherein the composition comprises a CED-10/Rac1 regulator or effector, a PDR-1/PARKIN regulator or effector, a PINK1/PINK regulator or effector, a LRK-1/LRRK regulator or effector, a DJR-1.2/DJR regulator or effector, a KGB-1/JNK regulator or effector, a KGB-2/JNK regulator or effector, a UCP-4/SLC25A27 regulator or effector, a CED-2/CrkII regulator or effector, a CED-5/DOCK1 regulator or effector, a CED-12/ELMO regulator or effector, and combinations thereof.

6. (canceled)

7. (canceled)

8. The method of claim 5, wherein the composition comprises EHOP-016, Sp600125, MG-132, rapamycin, apocynin, a pharmaceutically acceptable salt thereof, or a combination thereof.

9. (canceled)

10. The method of claim 1, wherein the composition is effective in modulating the gene encoding the at least one protein, an expression of the at least one protein, an activity of the at least one protein, localization of the at least one protein, a regulator, a downstream effector of the at least one gene and/or the at least one protein, or a combination thereof, in a neuronal cell, and wherein the protein comprises P4-type ATPase/ATP8A or an isoform thereof.

11. (canceled)

12. The method of claim 1, wherein the composition is effective in modulating the gene encoding the at least one protein, an expression of the at least one protein, an activity of the at least one protein, localization of the at least one protein, a regulator, a downstream effector of the at least one gene and/or the at least one protein, or a combination thereof, in a glia cell, and wherein the at least one gene and/or protein is selected from PSR-1, PAT-2/α-integrin, PINK-1/PINK, PDR-1/PARKIN, LRK-1/LRRK2, DJR-1.2/DJR, UCP-4/SLC25A27, CED-10/RAC1, KGB-1/JNK, KGB-2/JNK, a mutant thereof, an isoform thereof, and combinations thereof.

13. (canceled)

14. (canceled)

15. The method of claim 12, wherein the at least one gene and/or protein is PDR-1/PARKIN, a truncated PDR-1/PARKIN, or isoforms thereof,
wherein the truncated PDR-1/PARKIN comprises a PDR-1/PARKIN protein lacking a Ubl domain, and
wherein the composition is effective in restoring expression of a PDR-1/PARKIN comprising the Ubl domain in the glial cell.

16. (canceled)

17. (canceled)

18. The method of claim 15, wherein the composition comprises a modulator of the activity of Janus N-terminal Kinase (JNK) or an isoform thereof, and wherein the JNK or the isoform thereof is a downstream effector of PDR-1/PARKIN.

19. The method of claim 15, wherein the composition is effective in modulating the expression levels, localization, or the activity of Rac1 GTPase (CED-10/RAC1), and wherein the Rac1 GTPase (CED-10/RAC1) is acting with PDR-1/PARKIN.

20. The method of claim 15, wherein the composition is effective in modulating the expression of the mitochondrial uncoupling protein UCP-4 in the glia cell, wherein the composition comprises an expression vector encoding UCP-4 or modulator thereof, and wherein the composition is effective in modulating PDR-1/PARKIN.

21. The method of claim 15, wherein the method is effective in modulating the timing of the glia-mediated NRE engulfment, and wherein the method is effective in preventing pre-mature onset of glia-mediated NRE engulfment.

22. The method of claim 12, wherein the at least one gene and/or protein is PINK-1, a mutated PINK-1 protein, or a combination thereof, and
wherein the composition is effective in restoring a serine/threonine kinase function of PINK-1 protein.

23. (canceled)

24. The method of claim 22, wherein the composition comprises a regulator of the activity of Janus N-terminal Kinase (JNK), or an isoform or ortholog thereof, and wherein the Janus N-terminal Kinase (JNK), or the isoform or ortholog thereof, is a modulator of PINK-1.

25. The method of claim 22, wherein the composition is effective in regulating expression levels, localization, or activity of Rac1 GTPase (CED-10/RAC1), and wherein Rac1 GTPase (CED-10/RAC1) is acting with PINK-1.

26. (canceled)

27. (canceled)

28. The method of claim 1, wherein the method is effective in regulating neuronal function, neuronal shape, an alteration in the rate of glia-directed engulfment and active pruning of Neuronal Receptive Endings (NRE), timing of glia-directed engulfment and active pruning of Neuronal Receptive Endings (NRE), or a combination thereof.

29. The method of claim 1, wherein the method is effective in treating a neurodegenerative disorder or disease in a subject in need thereof, and
wherein the neurodegenerative disorder or disease is selected from Parkinson's disease (PD), Alzheimer's disease, Autism Spectrum Disorders, leprosy, and gliomas.

30. (canceled)

31. (canceled)

32. The method of claim 1, wherein the composition further comprises a pharmaceutically acceptable carrier or excipient.

33. A method of treating a neurodegenerative disease in a subject in need thereof, the method comprising administering to the subject an effective amount of a therapeutic composition effective in modulating at least one gene and/or protein associated with glia-directed active pruning of Neuronal Receptive Endings (NRE).

34.-58. (canceled)

59. A method for treating Parkinson's Disease in a subject in need thereof, the method comprising administering to the subject a therapeutically effective amount of a composition effective in modulating at least one gene and/or protein associated with Parkinson's Disease (PD), wherein the gene and/or protein is expressed in a glia cell.

60.-87. (canceled)

The application's sequence listing, which the Patent Office published only in electronic form, follows.

SEQUENCE LISTING (58 sequences)

SEQ ID NO: 1 - RNA, 1266 nt, Caenorhabditis elegans
  source 1..1266: mol_type = other RNA
ctctcatgaagcatgtctgatgaaatctctatattaatacaagatagaaaaacaggtcaacgtaggaatctaacacttaatataaatataactggaaatatcgaagatctcacaaaagatgtggaaaagctcaccgaaattcccagcgatgagctggaagtggttttctgtgggaaaaagttatcaaaatcaacgattatgagggatttgtcactgacacctgcaacacaaatcatgcttctccgtccaaagttcaatagtcacaacgaaaacggtgctactactgcaaaaataacaacagattcttcaattctcggaagcttctacgtgtggtgcaaaaattgtgacgacgtcaagcgcggcaaactgcgggtttattgccaaaaatgctcgtcaacctctgttctagtcaaatctgaaccccagaactggtccgacgttctcaaaagcaagagaataccggcggtctgcgaagaatgctgtactccaggtcttttcgctgaattcaagttcaaatgtctagcctgcaacgatccggccgcagctctaactcacgtacgcggaaattggcaaatgaccgagtgctgtgtttgtgatgggaaggagaaagtgatcttcgacctcggatgcaatcatattacatgccaattctgtttcagagattatttgctaagtcaactggaacgattcggttttgtcaatcagccgccgcatggcttcaccattttctgcccctatccagggtgcaatagagtggtacaagatgtgcaccatttccacattatgggtcagacgtcgtacagcgaataccaacggaaagccaccgagcgattgattgccgtggacgacaagggtgtgacttgcccgaatgtctcgtgtgggcagagcttcttctgggagccctatgatgacgatggaagatcccagtgtccagattgttttttttcgttttgcagaaagtgcttcgaaagaaattgtgtgtgccagagcgaagacgatctcacccgaactacaattgacgcgactacaagaagatgcccaaaatgccacgtggcaaccgaacggaacggcggatgtgctcacattcactgtacctcgtgtggaatggattggtgtttcaagtgcaagacagaatggaaggaagagtgtcaatgggaccattggtttaattaataactctctaaaattcatcttttctagagattgtacgtgttattctgtagatttttacaacaattacggtgtgtctgaagttacattgacatt

SEQ ID NO: 2 - RNA, 1183 nt, Caenorhabditis elegans
  source 1..1183: mol_type = other RNA
tttcagctctcatgaagcatgtctgatgaaatctctatattaatacaagatagaaaaacaggtcaacgtaggaatctaacacttaatataaatataactggaaatatcgaagatctcacaaaagatgtggaaaagctcaccgaaattcccagcgatgagctggaagtggttttctgtgggaaaaagttatcaaaatcaacgattatgagggatttgtcactgacacctgcaacacaaatcatgcttctccgtccaaagttcaatagtcacaacgaaaacggtgctactactgcaaaaataacaacagattcttcaattctcggaagcttctacgtgtggtgcaaaaattgtgacgacgtcaagcgcggcaaactgcgggtttattgccaaaaatgctcgtcaacctctgttctagtcaaatctgaaccccagaactggtccgacgttctcaaaagcaagagaataccggcggtctgcgaagaatgctgtactccaggtcttttcgctgaattcaagttcaaatgtctagcctgcaacgatccggccgcagctctaactcacgtacgcggaaattggcaaatgaccgagtgctgtgtttgtgatgggaaggagaaagtgatcttcgacctcggatgcaatcatattacatgccaattctgtttcagagagtggtacaagatgtgcaccatttccacattatgggtcagacgtcgtacagcgaataccaacggaaagccaccgagcgattgattgccgtggacgacaagggtgtgacttgcccgaatgtctcgtgtgggcagagcttcttctgggagccctatgatgacgatggaagatcccagtgtccagattgttttttttcgttttgcagaaagtgcttcgaaagaaattgtgtgtgccagagcgaagacgatctcacccgaactacaattgacgcgactacaagaagatgcccaaaatgccacgtggcaaccgaacggaacggcggatgtgctcacattcactgtacctcgtgtggaatggattggtgtttcaagtgcaagacagaatggaaggaagagtgtcaatgggaccattggtttaattaataactctctaaaattcatcttttctagagattgtacgtgttattctgtagatttttacaacaattacggtgtgtctgaagttacattgacatttt

SEQ ID NO: 3 - RNA, 975 nt, Caenorhabditis elegans
  source 1..975: mol_type = other RNA
atgagggatttgtcactgacacctgcaacacaaatcatgcttctccgtccaaagttcaatagtcacaacgaaaacggtgctactactgcaaaaataacaacagattcttcaattctcggaagcttctacgtgtggtgcaaaaattgtgacgacgtcaagcgcggcaaactgcgggtttattgccaaaaatgctcgtcaacctctgttctagtcaaatctgaaccccagaactggtccgacgttctcaaaagcaagagaataccggcggtctgcgaagaatgctgtactccaggtcttttcgctgaattcaagttcaaatgtctagcctgcaacgatccggccgcagctctaactcacgtacgcggaaattggcaaatgaccgagtgctgtgtttgtgatgggaaggagaaagtgatcttcgacctcggatgcaatcatattacatgccaattctgtttcagagattatttgctaagtcaactggaacgattcggttttgtcaatcagccgccgcatggcttcaccattttctgcccctatccagggtgcaatagagtggtacaagatgtgcaccatttccacattatgggtcagacgtcgtacagcgaataccaacggaaagccaccgagcgattgattgccgtggacgacaagggtgtgacttgcccgaatgtctcgtgtgggcagagcttcttctgggagccctatgatgacgatggaagatcccagtgtccagattgttttttttcgttttgcagaaagtgcttcgaaagaaattgtgtgtgccagagcgaagacgatctcacccgaactacaattgacgcgactacaagaagatgcccaaaatgccacgtggcaaccgaacggaacggcggatgtgctcacattcactgtacctcgtgtggaatggattggtgtttcaagtgcaagacagaatggaaggaagagtgtcaatgggaccattggtttaattaa

SEQ ID NO: 4 - RNA, 424 nt, Caenorhabditis elegans
  source 1..424: mol_type = other RNA
ctttttgtgcttgtgctcgcggagctccccacaaatgcaagcgatcaaatgtgtcgtcgttggtgacggagccgtcggtaaaacgtgtctcctgatatcctacaccacaaacgcatttcccggagaatatattccgacggtattcgacaactactcagcaaatgtgatggtcgacggtcggccgataaatctcgggctctgggatacagctggacaggaagattacgatcggctccgcgaacgccggctccaaccagtgagccaaacccagggctacgtgatggcaaaggaaatcaaggctgtcaagtatctggagtgctcggcgctcacgcaacgtggtctgaaacaagttttcgatgaggcgatccgagccgtgctcacgccgccacaaagagccaaaaagagcaagtgtacggtgctctaa

SEQ ID NO: 5 - RNA, 1661 nt, Caenorhabditis elegans
  source 1..1661: mol_type = other RNA
ctttttgtgcttgtgctcgcggagctccccacaaatgcaagcgatcaaatgtgtcgtcgttggtgacggagccgtcggtaaaacgtgtctcctgatatcctacaccacaaacgcatttcccggagaatatattccgacggtattcgacaactactcagcaaatgtgatggtcgacggtcggccgataaatctcgggctctgggatacagctggacaggaagattacgatcgactccgaccactgtcatatccacaaacagacgtgtttctcgtatgctttgccctgaacaatccggcgagttttgagaatgttcgtgcgaaatggtatccagaagtgtcacatcattgcccgaatacgccgattattttggttggaacgaaagctgatctgcgtgaggatcgagatactgttgaacggctccgcgaacgccggctccaaccagtgagccaaacccagggctacgtgatggcaaaggaaatcaaggctgtcaagtatctggagtgctcggcgctcacgcaacgtggtctgaaacaagttttcgatgaggcgatccgagccgtgctcacgccgccacaaagagccaaaaagagcaagtgtacggtgctctaagatggggaaattggagcaaacaatcgcagaaactacaacaattttaactatatatatacatatatcatctggattttttttgttttatcgatgaattttgctgtgaaattaccggtttttagggagtaaaaattggcaaaaactgagcatttttaggcaaaaaactcgccgatttccgttcaaagaaatgctccaaatcggctgaaaattactattttttttaaccgaaaatcggccaaatttccactgaaaaagctcaatttcagccgaaaatttctcgatttttttccagaaaattgtccaaaatctgggcgtttccactctctaaatctgaatttccagcacactttttctcattttccccctctatttttatctctaaaaatttgttttgtatcaacgatttttcatcttaaactcgctgtgatacttttcttacttatccaccccaattttcagcatattttgtgctcatttttgagccgaaaaatgctcaatttgtccattcataattttgtgcttttccccttttcccacctgaaataggtcttttttcatctgaaaaattgaataacttttccccaaaaaccacaagtgctttttcctctctaatttttatcggtttattttttttatttgaaatttcttcgaaatttttgtgaaatttcttcgaaaaatctgaaaatgtttggaaatctctacgattttttctaaaaaatgttcaaactttttggaatttgtttgaaaaattatttggaatttttctgaaactttttttcaaaaactttcgatttttttttgtaatttttaggacacaacgaaccctctctccacaaccaaaaatcctcttttttctattgtgaatttgaacaacaaactcggctctttttcccttttttcttactttaattgttaatttctcttctttttgtccaacttttattatgctattttaatatgatgatatgatattttaccacactttttttctatgatggaattttaaatttgaacattttttgatggaaaaattggaaaaaaaaacaattcg

SEQ ID NO: 6 - RNA, 2115 nt, Caenorhabditis elegans
  source 1..2115: mol_type = other RNA
tgtatagaagtaagaatgtctatgaaacgattcggaaaagcagcatatcgaatcgcaaatgagttagttgcaaaaggtggacgactaccaattttccaacgcttcctgccgagaatatttcccgccacttataatttaggagttcatgtcgtactcaaaaaggctccatttccacgacaaaatgctctacgaattgctcgccttgtaactcgccacggtcgagttttccggccattttcctcagtaataatcgaaagacatcgatttcaaaatcaaaatgattggcgtcgaaagtttcaaccgattcgtaaagaattgccaagaaatgtggatttagtcgaacgaatcaggcagatatttggcaattctctacgatacaatgaggatttgaaaagcactgaatggccgaatagaattgattcttatgagtttggggaatttctcggtcaaggatgcaatgcagcagtttactctgcgagattagccaattctgatgcagaatcctcagggaatactcactatggtgcagggtttaatgaagtcacaaatatacttgcagaaattccgccagttagcaaagttgcacaaaagaaattcccgttggcaatcaaattaatgtttaattttgaacatgatcgcgatggagatgctcatctcttgaaatcaatgggaaatgaattggctccatatccgaatgctgcaaagttgctcaatggacaaatgggaacatttagacctcttccagcaaaacatccaaatgttgttcgaattcagacagcttttattgattcgttaaaagttttgccagatgcgattgaacgatatccagatgcccttcacactgcacgttggtatgagtcaattgcctccgaaccgaaaacaatgtacgtagtaatgagacgataccgacaaacacttcatgaatatgtatggactcgtcatcgaaattattggacaggacgagtgataattgctcaactattagaagcatgtacatatcttcataagcataaagttgctcagcgagacatgaaaagtgataatattcttctggaatatgattttgacgacgagattccccaattagttgtcgccgattttggatgtgcacttgcatgtgacaattggcaagtagactatgaatcagatgaagttagtcttggaggaaatgccaagacaaaagcaccagaaattgcgacggctgttcctggaaagaatgtaaaagtaaacttcgaaatggcagatacatgggcagctggaggcctttcttatgaagttctaacacgatcaaatccattctacaaacttcttgatactgcaacataccaggaatcagaactaccagcactcccatctcgtgtcaattttgtggcacgagatgtcatttttgacctactcaagcgagatcctaatgaaagagtcaagccgaatattgctgcaaatgcgttgaatttgtcattgttcagaatgggagaagatgtgaagcagatgatggaaaaatgtggaatatctcaaatgactactctattggctggaagttctaaagttttgagtcaaaaaatcaatagtcgtctggacaaagtgatgaatctgattactgctgaaactatcatggccaacctagctccacatttgattagtcgagcagaacgacaacttcgagcaacatttctttcaagaatgaatcgagaagatatttggagaagtcttcaatatttcttcccagctggtgttcaacttgacacacctgccacatcatcagactgtttggagactatttccagtttgatgtcgagtttttcaaatgattcagaaaattacgagaagcaacagaaaccggctaaaaatggatacaacaatgttccacttcttctcagaaatgttatccgtacagatgcggatggaatcaatggaattgtacatagagttcgatctaaatagatttgttttaacgattactgtagtttgaaacctctagattacatatgtaataaccttttttttttacttgttggtatttttcaaattgtacaatcacttttcatgccagtctattgcgttcttttgtctaattacggtttatcattccctcatttatggaaaatatcatacctt

SEQ ID NO: 7 - RNA, 1620 nt, Caenorhabditis elegans
  source 1..1620: mol_type = other RNA
agagttcgtgagaaaaggattaaaggattaaaggacgatccgttcttcaagcgctatgcactgcggatctgggagtcaggtacactgcctggtggtgatcccactaaaaaagcacaataagatggaagtggatctgccggtacataacgagtatgatgcgtctagatttcatcaagttacaattagggacccgatagccggcgcggacagcactttcactattccaactcgttatgtaaaccttagttttctgaatgccggcgcccaaggaactgtcgtaatggccgatgacctagtaacaacgcaacgtgtggcaatcaagaagatgcaacaaccatttgtgatgacaatgagcgcaaagcgagcatatcgagagtttatactgctaacgactatcaaacacccaaatataatccgtctactaaacgcgtttacaccggacacttcactttcaacgttccgagaagtatatctagttatggaattaatgacacacaatttgcacgaggttatacatcgattaagattggaccataaaacattatcattcttcgtctaccagagtttgtgcgcaatcaagcatcttcacaattcgggagtcattcatcgtgacttaaaaccatcgaatattgtcgtcaacgatcgatgtgtattaaaagttttagactttggattggcccggaagaagaatgtggacacatcgatgagaatgtcagattatgtggtgacaagatactacagagcccccgaagttatattaggtcttccctattcggaaaaagtagatatttggtcagtcggatgtatatttgctgaaatgatcaaccataccgtacttttccctggaaaagatcgaattgatcaatggactaaaatttatagtgttttgggaacaccagatgatcatttcattagtcaattgggtcagtcagctgctatgtatgttcgatcgttgccacgtcatcaggcacgagcattcagtgaaatcgttcctgataccaattttctgccggagactgaaaatccaagggtccatttgacaccacacgtggctcgtgatctcctgttcaatatgttgaaaatcaatcctgaagaaaggtattcagttgaagatgcactgaatcatccatatgttaagttgtggtttaaggacgatgaggtaaacgcccccgcatcagaaaatcgatacgatcaggaaattgattttgccgataagacacttattgaatggaaagagctaattttcaacgaagtgcaacgctatcaagccgaccacgacattttcactggataataaataataaaaaacctaaaattgtttctttttctctcaaaaataattgtgttacttttttcttcaaaaatctatctttcagttgtgttctgtcacttagttggccatattttctggtgattctctgcttattttctatattgattataatcactaaatgttaattattttggaatacagattttttggaactgttttgttttaagtataagaaattgaaccttagctccacaaaatttgcatctcattataaagtagggattgtttttcgattgtattgtcaggtttaaattcaaaattctaaatcaataaattaattttttagg

SEQ ID NO: 8 - RNA, 1229 nt, Caenorhabditis elegans
  source 1..1229: mol_type = other RNA
agacgcaacaagatgaatttaccttccaaatttcatcaagttactattacggacccgatagccggcgcgggcattactttcactattccaacccgttatgtcaaccttaaatttttgaatgtcggcgctcaggggattgtcgtaatggccgatgacctagtgacaacacaacgcgtagcaatcaagaagatgcaacaaccatttctgttgacaatgagtgcaaggcgagcatatcgagaatttatactgctaacgactctgaaacacccaaatataatccgtctgctaaacgctttcacaccggatacttcactttcatcgtttcaagaggtatatctggttatggaatttatgacacacaatctacacgaggtgatacatcgattaagattggatcatgaaacattatcattcttggtctaccagagtttgtgcgcaatcaagcaccttcacaatttgggattcattcatcgtgacttaaaaccatcgaatattgtcgtgaacgaacgttgtgtgttaaaagtcttagacttcggattggcaagaagacgcaacgtggacatgagaatgtcagattatgtggggacaagatactacagagcccccgaggttattttgggtctgaactattcggaaaaagtagacatttggtcagtcggatgtatacttgctgaaatgatcaaccataccgttcttttcccgggcaaagatatacgtgatcaatggacacaaatttctagtgtattaagaacaccagacgatcatttcattaatcaattagaaccaataggcgctgtgtatgttcgatcgttgccacaacatctagcacgtgctttcaatgaaatagttccggattccaattttctgccggagactgagaacccgaaggatcatttgacactacacatggctcgtgatctcctgttcaatatgttgaaaatcaatcctgaagaacggtattcagttgaagatgcacttaatcatccatatactatggttcaaggacgatgaagtaaacgcccccgcatcagaaattccggacgatgaggttaatgacattgacgattggactcttattgaatggaaacggctcattttcaacgaagtgcaaggctatcaaaccgatcacgacattttcaatgaataagaaatctttgctttctcaaaaaaattatgtttcttctgtttagctgcaaaaatctgtttctaataaacttaaaaaaaaacaa

SEQ ID NO: 9 - RNA, 1554 nt, Caenorhabditis elegans
  source 1..1554: mol_type = other RNA
aaccatcagcaagttaaagtgtgtgatcctgtgcacatggaggaacgattatccacaacatcatcgtatccgtcacatccaggtagaagcgtggaagaggatcacaacactctgctcgcatcctcctcgatatcatcaatcattcgaggaacccgtggacacctcaacaattttatcgagtccgttgggaattggctggttccatcatcatctggtcgagacgacgacgctgtctctttggatagttgccaatcagtgtacagtcctgttcgtcatcacataaacagtggaacaggaggaggaattctcatggaaccatcctctattcatgttcccgaaaactattattcggtgacaataggggaagcgcagatggttgttctcaaacgatatcaaaatctcaggttgatcgggtctggtgctcagggaattgtttgctcagcgtttgatacggtacggaacgaacaagttgccataaagaaattatcaaggccatttcaaaatgtgacacatgcaaagagggcttatcgagaattaaaactcatgagtcttgtaaatcataaaaatatcataggtattctgaattgttttacaccacaaaagaaactcgacgaattcaacgatctttatattgttatggaacttatggatgcaaatctttgtcaagtgattcaaatggatttggatcatgagagattatcatatcttctttatcaaatgttatgtggtatcaggcatttacatagtgctggaattatacacagggatttgaaaccatcaaacattgtcgttcgaagtgattgtactctaaaaatcttggatttcggattggctcgaactgcgattgaggcattcatgatgactccttacgttgtgacaagatactatcgggcaccggaagttattttaggaatgggttacaaggaaaatgttgatgtttggtcaattgggtgtatatttggagagctgatacgtggacgtgtactattcccgggtggtgaccatatcgatcagtggactaggattattgaacaattgggtactccggataggtcatttttagaacggttacaaccaactgtcagaaattatgtggaaaatcggccaagatatcaagcaacgccgtttgaagttctcttcagtgataacatgttcccaatgacagctgacagctcaagacttacaggtgctcaagctcgtgacttactttctcgaatgttagtcatagatccggaaagaaggatttctgtggatgatgcactgagacatccatatgtcaatgtttggtttgatgaaattgaagtatatgctccacctccacttccgtatgatcataatatggatgtggaacagaacgtggattcatggagagagcacattttccgagagctcacagattacgcaagaacccatgacatttattcctgattccatgttttacggtcacatttcgatctctatgttttttcattcgcgtaattgttttcaaatgtctccttttctgtgctcatatttctatttaaaaaaaagataataaattgtttgaaagttgaa

SEQ ID NO: 10 - RNA, 1473 nt, Caenorhabditis elegans
  source 1..1473: mol_type = other RNA
gtagaagcgtggaagaggatcacaacactctgctcgcatcctcctcgatatcatcaatcattcgaggaacccgtggacacctcaacaattttatcgagtccgttgggaattggctggttccatcatcatctggtcgagacgacgacgctgtctctttggatagttgccaatcagtgtacagtcctgttcgtcatcacataaacagtggaacaggaggaggaattctcatggaaccatcctctattcatgttcccgaaaactattattcggtgacaataggggaagcgcagatggttgttctcaaacgatatcaaaatctcaggttgatcgggtctggtgctcagggaattgtttgctcagcgtttgatacggtacggaacgaacaagttgccataaagaaattatcaaggccatttcaaaatgtgacacatgcaaagagggcttatcgagaattaaaactcatgagtcttgtaaatcataaaaatatcataggtattctgaattgttttacaccacaaaagaaactcgacgaattcaacgatctttatattgttatggaacttatggatgcaaatctttgtcaagtgattcaaatggatttggatcatgagagattatcatatcttctttatcaaatgttatgtggtatcaggcatttacatagtgctggaattatacacagggatttgaaaccatcaaacattgtcgttcgaagtgattgtactctaaaaatcttggatttcggattggctcgaactgcgattgaggcattcatgatgactccttacgttgtgacaagatactatcgggcaccggaagttattttaggaatgggttacaaggaaaatgttgatgtttggtcaattgggtgtatatttggagagctgatacgtggacgtgtactattcccgggtggtgaccatatcgatcagtggactaggattattgaacaattgggtactccggataggtcatttttagaacggttacaaccaactgtcagaaattatgtggaaaatcggccaagatatcaagcaacgccgtttgaagttctcttcagtgataacatgttcccaatgacagctgacagctcaagacttacaggtgctcaagctcgtgacttactttctcgaatgttagtcatagatccggaaagaaggatttctgtggatgatgcactgagacatccatatgtcaatgtttggtttgatgaaattgaagtatatgctccacctccacttccgtatgatcataatatggatgtggaacagaacgtggattcatggagagagcacattttccgagagctcacagattacgcaagaacccatgacatttattcctgattccatgttttacggtcacatttcgatctctatgttttttcattcgcgtaattgttttcaaatgtctccttttctgtgctcatatttctatttaaaaaaaagataataaattgtttgaaagttgaaa

SEQ ID NO: 11 - RNA, 1346 nt, Caenorhabditis elegans
  source 1..1346: mol_type = other RNA
agacaactaatgtcattagggcgagatagatactcattaccgcgtacttataaacgggtttcacatgcgaaggacaaagcgagaccggagctgagaaagttcggatgggagactctgggatactcggaaagctttaatctgcctccatttagggatagtattcaaagagttgatgggaataatcttaccgtggaggagttccgccgagatttcgaaagaccgagaatcccagttattatcactggattgactgataattgggcagctaaagacaagtggacggttgagcgcctgtcgaaaaagtaccgtaaccaaaacttcaaatgcggagaggacgacaatggcaactcggtgagaatgaaaatgaagtactaccatgactacatgctcaacaataaagacgactcaccgctctacatttttgatagcagttttgcagagagacgaaagacgaaaaagttatcggaagactattcggttccaaagttcttcgaagacgatctcttccactatgcggatgataagaagagacctccacatcgatggtttgtgatgggaccagctcgttctggaactgcaattcacattgatccactcgggacaagtgcatggaattcgttgcttcaaggtcacaaacgatgggttctgattcctccgattgcaccacgtgatcttgtgaaaccgatggctcatgagaagggaaaacatccggatgaaggaatcacgtggtttcagacggtctataaacgagttcgaagtcccagttggccgaaggaatacgcaccgattgaatgtcgtcaaggaccgggagagactatgtttgtaccgtctggatggtggcatgttgttatcaatgaggaatacacaattgcagtgactcacaactattgctctgtcgagaatttgcatcttgtatggccgaaaactgtgaagggaaggcccaagttgagcaagcattgggtcaaaaggctcacagagcaacgtcccgagcttctcgaaattatcaaatcggcttctgaaatcccgctctatgatatgaacgagtcttcaagtgattcttcaagctcttcctcatcatctgacgattcttctgatgaatctgattgtgatgatagtgggcgatgtggtggacgaaaacggaagaacgacgatcgatcgaatgagtgtccggagaaaatgagcactacttattttcagaactcgctagtttaagcttttaaaaaaattaaattccaaatttcctaaccgttgttatattattttacatttgtttcatctctgttctatgaacacacatttatttggaatattcagatttaaacacgaattaaacttgttcgaatttg

SEQ ID NO: 12 - RNA, 855 nt, Caenorhabditis elegans
  source 1..855: mol_type = other RNA
atgaaaatgaagtactaccatgactacatgctcaacaataaagacgactcaccgctctacatttttgatagcagttttgcagagagacgaaagacgaaaaagttatcggaagactattcggttccaaagttcttcgaagacgatctcttccactatgcggatgataagaagagacctccacatcgatggtttgtgatgggaccagctcgttctggaactgcaattcacattgatccactcgggacaagtgcatggaattcgttgcttcaaggtcacaaacgatgggttctgattcctccgattgcaccacgtgatcttgtgaaaccgatggctcatgagaagggaaaacatccggatgaaggaatcacgtggtttcagacggtctataaacgagttcgaagtcccagttggccgaaggaatacgcaccgattgaatgtcgtcaaggaccgggagagactatgtttgtaccgtctggatggtggcatgttgttatcaatgaggaatacacaattgcagtgactcacaactattgctctgtcgagaatttgcatcttgtatggccgaaaactgtgaagggaaggcccaagttgagcaagcattgggtcaaaaggctcacagagcaacgtcccgagcttctcgaaattatcaaatcggcttctgaaatcccgctctatgatatgaacgagtcttcaagtgattcttcaagctcttcctcatcatctgacgattcttctgatgaatctgattgtgatgatagtgggcgatgtggtggacgaaaacggaagaacgacgatcgatcgaatgagtgtccggagaaaatgagcactacttattttcagaactcgctagtttaa

SEQ ID NO: 13 - RNA, 1251 nt, Caenorhabditis elegans
  source 1..1251: mol_type = other RNA
atgttgtcgtttgccacagagtttttggacgatatgaagagacaactaatgtcattagggcgagatagatactcattaccgcgtacttataaacgggtttcacatgcgaaggacaaagcgagaccggagctgagaaagttcggatgggagactctgggatactcggaaagctttaatctgcctccatttagggatagtattcaaagagttgatgggaataatcttaccgtggaggagttccgccgagatttcgaaagaccgagaatcccagttattatcactggattgactgataattgggcagctaaagacaagtggacggttgagcgcctgtcgaaaaagtaccgtaaccaaaacttcaaatgcggagaggacgacaatggcaactcggtgagaatgaaaatgaagtactaccatgactacatgctcaacaataaagacgactcaccgctctacatttttgatagcagttttgcagagagacgaaagacgaaaaagttatcggaagactattcggttccaaagttcttcgaagacgatctcttccactatgcggatgataagaagagacctccacatcgatggtttgtgatgggaccagctcgttctggaactgcaattcacattgatccactcgggacaagtgcatggaattcgttgcttcaaggtcacaaacgatgggttctgattcctccgattgcaccacgtgatcttgtgaaaccgatggctcatgagaagggaaaacatccggatgaaggaatcacgtggtttcagacggtctataaacgagttcgaagtcccagttggccgaaggaatacgcaccgattgaatgtcgtcaaggaccgggagagactatgtttgtaccgtctggatggtggcatgttgttatcaatgaggaatacacaattgcagtgactcacaactattgctctgtcgagaatttgcatcttgtatggccgaaaactgtgaagggaaggcccaagttgagcaagcattgggtcaaaaggctcacagagcaacgtcccgagcttctcgaaattatcaaatcggcttctgaaatcccgctctatgatatgaacgagtcttcaagtgattcttcaagctcttcctcatcatctgacgattcttctgatgaatctgattgtgatgatagtgggcgatgtggtggacgaaaacggaagaacgacgatcgatcgaatgagtgtccggagaaaatgagcactacttattttcagaactcgctagtttaa

SEQ ID NO: 14 - RNA, 3972 nt, Caenorhabditis elegans
  source 1..3972: mol_type = other RNA
tagatgcgagagggtagttttccgcgaaggatcggcttgcttctaggcttactgggccttttagccggagttgccaccttcaacatcgacacaaaaaatgtagtggttcatcacatggctggtaactactttggatactcactcgatttttaccatgagcagaagggaatgcctgtcctcgttgtcggtgcccctgaagctgaaagcaataacccaaacctggctggaatccgaagacctggagcagtttatgcttgctccgtgaaccgggcaacatgccgagaagtccacgtggataaaatgaagggaaacttgaagaaactcaatggatcacatcttgttccaattgaagaaaaatcacatcaattctttggtgcaactgttcgatcaaatgataagcatgataaaattgtggtgtgtgctccaaaatacacatatttctactcaaaattcgaagttattgagccagttggaacctgtttctatgctgaaaatggatttgataatgcggaggagttttcatcgtgcaaacaagaacctgctcgccacggtcgtcatcgtcttggatacggtcagtgcggattctcggctgcagttccaggaaagaagaatcaaaatcgtgtttttattggagcccccggtgtgtggtattggcaaggagcaatgttctcacagaacatcaaaaatcagacagaccgcccgaataccgagtacggtagcaaggaatacgatcacgatatgatgggatattctacagcaactggagattttgatggagatggtattgatgatattgttgccggagttccacgtggaaacgatttgcacggaaaattggtgttatacacgtcgaaactgaagatgatgatcaatttgactgatgaggtgtcaactcaacatggacaatattgtggaggatctgttgcagttgctgatgtaaataaagatggacgcgacgacattatcatgggctgcccattctacacagattacggtagcgtgaaagacgcaaaaacacaagaaagaaaaccacaatacgatgtcggaaaggtcattgtgatgcttcaaactgctccaggagtctttggaaaacagattgcagttgttggagatgatcagtggggacgatttggacacgcagtcgcagcagctggagacttgaatttggatggttataatgatgtaattgttggtgcaccatatgctggaaaaaacaaacaaggagctgtttatgtgatccacggatccaaagatggtgttcgcgaactaccaactcagaagatcgaaggagccaatattggtcatggaaatatcaaatcatttggcttctcccttactggaaacgaagatgttgatggaaatggaatgccagacattgcagttggagcatggaaatctggaaatgcagctgttttactcacaaaaccagttgtcactgtcacgggacaaactgaaccagagagtgcattgatcagtgtagaagataagaattgcgatgttgatggaaaattgggaaaacaggcatgcaaacatattaatacatgtttcaaatatgaaggaaaaggagatacaccaaatgatttggaatttgatcttcgattcaatcttgatgatcattctcctgaaccaagagcttatttcttgcaaaaagatgtgaaatctgacagaagcattaaagttgcacaaggatctaaaacaagagaccatccatcttcaatcgaacaacgtgttcgtcttgagaagggacgacaaaagtgtttcagacatcgattctttgcttcttccacaatgaaagacaagctctccccaattcattggtccgtcaactacacatatgttgaatcaaaaaccggaaaacttcgtggtgataagcttgaaccagcaattgacacaactgtaccactttcattccaaaataagattaatattgcaaataattgtggaaaagatgatctttgtgttcctgatttgaaggttaccgctgttgctgatcgtgagaaattccttttgggaactcaagacaatacaatgcttatcaatgtaacagttcaaaatggaggagaagattcatatgagacaaaactttatttcgatgttccacaaggattcgaatacggtggaattgaaagtgttggtggagatggaagcaagtctgctccagcttgttctccaacttccgatgaaccagattcggatggaaaatggacttttgcatgtgatctcggcaatccacttccagctaacaaagtagttagtagtgttgtaagagtgactgcttcttctgataaacctccacttgctccaatcagtattaatgctcatgtgaacagtagtaatgatgaagaagctcatactgttgctgataataaagtcacattcactattccagttgattttaagaatcaattgagtttgaatggtagatcaaatcccgaacaagtcgatttctcaatgacgaacaaaacacgtgtagatgctttcgatgacaatgaaattggtccagttgtttcacatctttatcaaatcagtaatcgtggtccatctgaggttgactcagctactttggatatcttctggccatcattttccactgaaggaggtcatcttctgtacattatcacagaaccagttgttaatccaccaaataaaggaagatgtcgggtcaaacaactgcaaaatgttaatccattgaatttgaggataacaaatgagcatgttccaactgaaccaccagttgccaagacaccaaatgaatattcaagagaagaagatgatgaatcatatgaagatgaaacaacaactcaatcccaatcaacacgtcatcaatctacacaacatcaaactcatcatcaatctggtccagtacatgtatacgaaaaagacgaggagaagattcgtcagaatactggaaattggcaatatgttgaggataaaaagaagaagggagattatgaatatattccagacgatcaggaatatgatggagatgattttgaagaggaagatgatgaagattttgatagagctggaagtaagagagttaaaagaaatccaacaccaaagaagaagaagaagggaggagaacaccgtggtgaaccaagaagtgataaggctagattctctgatcttcgtgaagctgttaaactttcgaaggaagctggaggagttgttgattataagggaccactatcaagagcatctgttgattgtaattcattgagatgtacacatattgaatgtgatatttatgatcttaaagaagacgagtttgtacttgtggaaatcttctctagattatacacaaacacattggttgatgagaaaaatcctggaggagacatttcatcgttggctcttgctcgtgtcacatctactaaatacaatcttccacataagccaacattgataacagcagtatctacaaatatgaatgcaattgcttctgaagaaggaagagatcttccttggtggctttatcttttggctattcttattggacttgccattttgattcttcttattttactgctctggaggtgtggtttcttcaaacgtaatcgtccaccaactgagcatgcagaactccgtgccgaccgtcaaccaaatgctcaatacgctgatagtcaatcccgttatacatcacaagatcagtacaatcagggacgtcacggacaaatgctataatattttccattttttgttccttattctttactattcacatctgcgggtgtctttttaaaattatcattttggtcccaatttagtcctcttgtcgtgccttgccccccaatcttactttcatgttcgatcgtttttcggaatctccgctcaatttggtgctttatatgttcatattatgtttctttgttttccaattaattaccaatacattgacatgtttctagtcgatatttttgatgttttttcttttattatcatcaatttattaataaaaatttaataaataaa

SEQ ID NO: 15 - RNA, 1279 nt, Caenorhabditis elegans
  source 1..1279: mol_type = other RNA
atgtcatcagcagtcacaagtacgtcagactcaactgcgccgggcaattcgcagactttcaaaaaaatcgccacgaagtattttttatcatgtacagctgcattagttgccgaaacggtcacatatcctctggatataacaaaaactagactacaaatcgctagaaataagtttacaaaaggagggatggtgcaagtaacatacgatatcattagaagagaaggagcaatggctttatggacaggagtagcaccagcaatcacaagacattatatctacacaggaattcgaatgggtgcttacgagcagattcgtttacttacatttaataaagaagtagaaaagtcatttccgttatggaagtctatgctttgtggtgcattttctgggcttattgctcaattcgcggctagtccgaccgatttggtgaaggttcaaatgcaaatggaaggacttcgaagattgcagaaacaacctttacgatatacaggagcaaccgattgcttcagatccctttatcgaacacaaggattttttggattgtggattggttggatgccaaattgtcagcgagcagcactgctcaatatggctgatattgctacatatgacagtgtgaagcatgggctcattgataatttcgaacttaaagataattggctaactcatgccgttgctagtgcttgtgctggacttgctgctgccattgtatcacttccatcagatgtcgttaaaactcgaatgatggatcagattcggcacgagctggacgccaaaatgatgcataagaaaaatacgcatgtggatctatacaaaggcgtcgtcgattgctacataaaaattatcaaaaacgaaggatttttctcactttacaaaggattccttccatcttatattcgaatggctccgtggtctcttaccttctgggtctcctacgaagaaatccgtaaatggaccggcgcttcaagtttctagttttgcttcataattcagtttatagtttttgcttaaaattgtaattagttatagatttttcagtttatttttaattcatttaatgtaagcccacgggttattgtcttttttctatgatttttgacagataggaaattattttttgttgcgagcttccgtcaatcccatgtctttttttctaattacctgtgccatctttcttcccttttcgttgctcatagactcttttcggtgtattttttgcatttatttttagcgttttcgaatttgagatattcgttaaattagatcagtttgtatgttg

SEQ ID NO: 16 - RNA, 1094 nt, Caenorhabditis elegans
  source 1..1094: mol_type = other RNA
aaatgacgacaaacgggttcgatccattcgagtggcgttcattctacttcccaggaatgagccgtgaagaggctcacaagttgctcggcgagccacaagtatcgatcggcaccttcctaatgcgggatagctcacgccccggtgaatattcactgacagtacgtgaagccgacgagggaaatgccgtttgtcattatttgattgaaagaggagaaccgaaagaagatggaactgctgcagctggcgtgaaaatcgcgaatcagtcgtttccagacattccggcgttgttgaatcattttaaaatgcgagttttgactgaggcaagcctgctggccgcctacaagaagcctatcattgaggttgtcgtcggaacattcaaattcacaggggaacgagagacagatcttccgtttgagcaaggagagcggctcgagattctttcaaaaacgaaccaggattggtgggaggcgagaaacgcgttgggaaccactggattagtgccggcaaactatgtacaaattcagatggaatttcacaatgacagaacctcaaaaggcgccagtcaatcgtcgatcggaagcagcggaggtggcgccgaacgattttcgagcgccagcacgagcagtgataatattgagctccagccccgtctgccagcaaaagccaaagtgacgttcgatcgtgtcccaaacgcctacgatccgacccaattgcgtgtgaaaaaggggcaaacagtgcttgtaactcagaaaatgtccaacggaatgtacaaagcggaactcgacggccaaattggctcggtgcctcatacatacctcagattcaccgccgtcagcgaataaaatcgttttttttttctaaatttttaaccttgaaatttattgattcgcttgcccctccaccagttttcctctaatacattacagctttaccatagaaaaaaatcgtttttttttccaaattatatttataatgatatcatgcacaattttcgttgccttttccgcccaccgaaccccaattcgtgtccattccattttgttcacttttccctttcaacctgccggatgattaataaaccgttttaattatga

SEQ ID NO: 17 - RNA, 5644 nt, Caenorhabditis elegans
  source 1..5644: mol_type = other RNA
ataaatgagttcgtaatggcaacgacgggtttctattatgcaatcgttcaatacacatttgaggatccgcttccatcttgtgatgctccacgattagaactttttattggcgatcgaatatgtgtttacgggcagcacggagagtggggatatggtcgaaaatttgacgagaaaaatggaaaatgtgggatttttccacttgcctatgtacaaatcgttcaaaagtccatgttcgtatcgacaagtgacggatatctcgttgtggatgaaatttccagagttattaatgaatggtggaccaaaattaaagaattgatggtggaaacgacaaggattggatcattcgaagacttgatggatagttttaatgaactactaataataaaaactaaaatcgaaagtggtgggattccaattgaagagttgagcaaactccgattgcgcgtttcaaaactggtagaccgtggaaatacaattcttggccaagatgtagtgattcgcaatgaagagggtgttccgcttgacgttgaatcactttcacttcttagaacatatgaagcacacatttcttcgaaaggaagggtcggatcattgatgcgggagaaacctgaaaatgttacaatcaacgatagtttctcattgctgctctccattaaatctgtcgaactccattgtaaatattcctgtgaaataagcatatcactatatgatctggacaagaaaatgttcaccacagatagttatacatttctctggaacagcggtagtggaaaacacacggatttaaatttgaaagcactgttcactgattttgcaaaagaagatattcagaaaaagtatttgatggtaactcgagttgttcatgtatcaccgattgaatcttctaatgctacgatgagaaagcatggacatcacgaagcaactataccaaagacattttattgtaggcaatcgtacgcctcggacatcatggaaatgtcaagcatctttcttgctggtgttggccacgaagcaaaagaacgtgtaattttcctgaatcgagaaccagaacttccattatctctaaaagcatatcacgctacaaatcgtataccgaagaatttaagcaacgatatggaaacaaaactattgataagtacccaattagttcctggaaatgtttctcaaatcaaggcaagacacccacatttgttcagtagatgtccagcggcgattctacgaagagctgatagaacagcagtttcaattgaagatagtcgaaatgagatgtatattactttaatgcaggctgaattatctggaaaatcatctgatcgtaacattgaggcacgtcttcatgtcgtggaatcaaatggacatgttatggaaaatgtttttgagactatttcggttactggttcgcaacttagcactgtctacaagagtattgtagtttatcatactgacaaaccaatgtggacggaaccaataaaaattgctcttccctcatgtgcttctcatgatgtataccttcggatcttattttattcgaagaaagcatatgacaaaccaaaaccagaaaaaggaccatttgcaattgcacatgttcaactcattcgaagtagtgctctactctgtgatggtgaacatgacttggctgtctacaaaattgataatccaggatctcactttgatgaatcaaatgtacattatatgaacttacctgataccagaagaacactcaaagaatcaattggaagcgcgaaacctcattcacagggttttagtttgagtgataaaagttttgtgatgatatccactcattcatgttcttcaatgttaactcaaaatgagcatttgttgaatgtgttgagatggcgtgtaaattgtgtcaaccttacatcttcattggtggctcttgctcaaccaattggagatacggaacacgaaatgattcgattcttctcacatttattggatgcactctttgaaatttggcatgatcgtgagacttcggagaaagtcgtttttgatgttatcgtggcggttttaagaatttgtgaggagccacgacactacccacaggctgcaaaaatattcgaagtgtatctgaaacgattttcatttacttcagcggcactaaaaattctaaagtgtctcaatcactatgtcatctcggattcagaagattcaaatgagaaagcgagaaatgcattcaaagttatgggtcctctcttcaaattagttgtcgtgtcgaagaaatgtggaataaaattcgaagagttcgacgatttcgaaaagacttataagcaatatcttcgagaatttatgaaatcactcgtagctctcatgtcagaaaagaaagcaaaaatgactgttcagaatacagctcttaaaagtattccgacgataattgatttgctcaatgaaagcgattcggtatctccagagaatctttgtggatttattgttgatttgatgaataattttggatcaaatattgttactcgtgagcggctcaattttattgcacagattgtggaaactcggttcttttcgctttcaatctgccgagaacaacttctgattccatgtcttcaaatcgctcttgacataatacaaatcgacaatatggcaaccgaaaaaggagaatttgcagatcgtgccgctgagtgtgccagtattattgctgctattctggagagactattcgctgacgcgaaaagtggtgaaggtaacgctgagagagaattgacatcattcattttaatggtttatcgtccacttgttcaagcaatgattcgagtaatccacgacgacaagcacactgatgatgatgctcgtggtcactttttctctgtaatattggcattattagacaaaatgtccgcccaaatgtttagtgaatatgtggaagagcgatcatcggatattgataaacgtgattttctcatggaaatggttcaaatgattcgagatttactcaatcgaaatgccttcccatctacttggaaagatatgataatgttgcagaataaagtgatccacaaatcattacgattcgtcatgtcggcagttcaaacattcttctccaatgacaaattctgcgttgagatgtggagagaatatatggtaacagtagtttcatttgtaacacaagaaggactcaattctaaacatgaatggatgaaaaatgaagatgaagacatgaggattcaattaagaaaagctgcagcaaaagatcttcggagcatgtggttccgattgacaccctctcagaaattgaactacattccgagtatgattggatcattcctcaaagtatcactagtagatgatgatgaaactcgtgaagccactattccaatatttttcgatatgatgcagactgaatacaacacgagtgccagtagatctttcacggaattcgcttctgaacttgtatcacagcttgatacaaatgttgatcaacatagtgcgacaaaaggattcaaagagcattttcgtcaattatcaattactctgtgtcaatccgataaagaattaatggcgaatggtggagaagaattgattgaacgaattgatcgtttattaactgctctcattgaatatcatgaagtcgcatcgaaaagtctcgtggaatgtgtggatagtcttatgagtagaactgttcagttgatgagatactataatcaatattctcataaggaattgtatgtcaaatacatctacaagctatatgatctacacacatcgtatggaaataagattgaagctgccaaaactttacttcgacatgccacaatgcttacgtttgacgatgatgctcttccacaatggctcattgctcgatctcttaacagacatcgtgagctgcatcgtcaattaaaagaagatttaatggaagaagctggtaatttattttcaaaaggagaagattgggaggacgcactgattgtttacaatcaacttgttccagtatatcagaatatcattatggactacgataaattggcaggattattgcaaaaaattgcccagttgtatacaagcatcagtcggacggaacgtgcatatttctattactacctggtggccttctacggacaaggattccctgcttatttgaacgggcacaagtttgtgttccgaagtgaaaaactcgaaatgcacggagaattcatgcagcgaatcatgaagatgtacgataatccggaaaagatcatgaaaacagatccttgtcctcaccttgtcgactcccccggccgttacattcaagttttcaatattgatccaatcggtaccggatgctcatttgaaaataatcctgaagtgaaaccggttatcaaaaaatatttcagatattataatattcaaacatttgaatattcaaaagttgaagaaagaaaagatacaaagtggacaagtatagatccttcatctgaattcatgaggaattggcttgttcgacggagaatcaagactgctgacagtctgccaactgatttacgattcacggaaatcgtcgagctatccgacccaatttatgtaactccattacaaaatgcagttgaacaaatgagaaaaaagaataaagaactcaatgaaacggctgccagtgctgagagcaatcctaatttcgatttgaaacttctgagcagagatattcttggagtcgtcagtgcagctgtgatgggtggagtcaaaaattacgaagtattcttcacggaagcgtgtagaaatatatgcgagtgcggtgagcagtctgtgatcatggaattgagctcgttgataatcgaacaagttgaaattttggaatattgctgttatgttcatgctagtcgttgtcaaggagaagcaagagcaattaatacaatgttggcagattcatttgacagtcatcgtagatatgttgaggaaaactttggaaaaacaagatccaggttgccaacacatgctaatattcgactatcatcgtttgattcggattcgatcaatgatggaatgatgacaatgaagtcaggaaaagctgcagtacttggaaacgctgtggctaacctaatttattcgaacaaacgatctagtggacctggaactcctgtcaacttgtcaagtcgttcagccccttcattcgataacatttcatctaaacttcggagttctctggcaatttccaagcttgcacccccaccgcgacctccaaatcccatatctccaattaaccgtggaccatcttcaaattatgaaggaatccgtatgagagctcattcacatcaggcttcaacagtctctcttaatcatatgtcagttgctccaccacttccacctcgtccagatcgtcctgatatggatccaaatcgaacattgaagcgaaaaaattaatttttgttttaattaaattttgaatatcttcacaaatttccagagtcataatcaaaaaacgcatgataatctaattctaattcattaattgcatttctattttatcattttctcaaaattccctttcccctgctggttttatctgtgctcttttactagtcactcactcacttcaaaatgttttaattgtttcctttttcaaaattcttttccttcctgtgaatatgttacaagttaataggaattattttcagagcttcattttccatataaagaaatctcc

SEQ ID NO: 18 - RNA, 2288 nt, Caenorhabditis elegans
  source 1..2288: mol_type = other RNA
atggcgttccatatgccattaaaggagttacaaccagttgacacatcacttccggagcacgttgtcaagggtgccgtagtgattgacaaagaatttacaatatggaatcatcgagctgtaattccatcaaatgctcttcacacagtattcataacaatcaatttattggaacaaaaactgacggatgtcgtgaaaatggcagctcgatcaatgaatttatcagaagatgattcgtatggattgatggctgataaaccgaaaagattcataactgatgataatttgaattcattaggaagtggtttcatattaacactttgtgcatcaccggatcattatgttaaacggattactgaaatattgacagaaggaaataatatttcacaaatggaaaatgctgtgaaaactctcgatgagttttctctggatcccgctctaattgaagccttttatcgatgctcatctcttgaactcttgttcagtttaattcgtgatgatcgagtttgtatgagctcaacacttctttcaacatgtcttcgtgcactttcaagtatgctggaattagctgtaggagattttacatggaaatcagtaccaaatgatgtagttgtgtctatggcatcattggtaactggaaaagcgaaacgagaagaagcgaacacgttgttagctgctcttcagatgctcgaacagcttgttatcggtgacgatacaactcgtgattggattctcgaagaagttccaatagagactctcattcgacacgttgaaaaatcagatgaacgaattgctctttgtgcactttcactaatgaattcaatgataagaagatgtcctgatgatgaaaaacgatttgaacttattaaatctttagaagtcgttccattccgtaatgctgtacacagttctcttctacgtggtggtggtggtgttcgaaatctgaatgctattgaacaacttgttgaggttcaaaggagtctgattagtgcatatgaaacttcacctcctactgatgctgaagttcagaaaattcttgatattgaatccagtgaggatgtttccgaggagatcagagaaatgtggaaatcacaaattggggaacaccgatgtggacggttggctgcaatttcgatggttcaatttgcagaaaaaagtccgcaagatctgagaatgctaatttcggagaatacaatgaggattgaaggaggaaaatggcaactgattccaatgtggatgaggtgctgtgacattgccgcagaattgttcagagtaatacctggtcgtgatgagttggatcgtttgattgtagttctcttttccacggagactccatttccagctgtattcgcatgtattgtacaccttttccatcgaacatggcgtgagatgcaggcaaaaggaggtgaaatggagaaagttgcgtgtgttgtactggaacagttacggcatgtgctgaaaagacgggaaatacaagatgtagaagaactatctgcggatttggagactttttcgtatagggcaatgcaagaaatttggagagaggaacaattgggaaaggaaaatattcaattacatagtgaagctgtgatacaactaaaatcgaaattgcggccaaaaatggaggaattggttcgaataaatcatctaaactatttgaagttaggcgccgtttttcgaaaaccacagaaaagtaaatccctcgcaaagctcgccttctggcattggaagctcgatgcatcggagaaaatgctcactataactggatgtgatggtgagaactatgtggaaggtgtgcagagagatgatattcggcaagtttggatcaaagatattgctgatgtaacaaataatgatgagattgatagaaaagcaagctcatctcgattcacttcttctccatctacacaaatgttaagagggattcgtgtacaattaaaaacaacaaatgatatgaaagaaggcgaagttttaatggcattgacatccgatgaaactcaatctgttatatggcttgaaggtcttgctgaattgattgggagcaaggcagttaaaagtgaaaccgatgcaatggttgaacgaatgctgaaaatggagctacgagttcgccttctcaatgtgaaactcacgaaccccgaggagaaaccagaaattccaccgatccctgacgatatcaaaagctttatttcaaagttttaatcatattcaagctttatcattcttacgtgcattttaccatattgaaaggcaaaacatttccatgtgcataataaattttgtaatttatgcct

SEQ ID NO: 19 - RNA, 4185 nt, Caenorhabditis elegans
  source 1..4185: mol_type = other RNA
ccagtgtttttctctgcgtctcacaccttcttgctctctcgcctccccaaggaagttgacacgaacattatttgctttttgggggtgaacttatttccgtgtttgctacgttttttttcaccttttttttttgtttatttaaataaatattatattaattaattaatttccaacaaaaaaattggattttcctgcaggctcctcgtcattctatgaccgaaaatcgataatttgtttgatttttcataattcaacaaaaaatcgatagcaaagaagtcgaggtcaaacactttttggagcataatgcccacagaggcaagagataataatcgacatatccatcttggcaaagtcagagatccccaccaccagcatgctcaacgattttgcagtaatagaataagcacttgcaagtacaatggattctcatttcttcccagatttttgtatgaacagttccggcgttacaataatatatttttcctagcaatcgcccttcttcagcaaattcccgacgttagcccgactggaagatacacgacagccgtcccatttctgataattttatcagtttctgcactaaaagaaatattcgaagatgtgaaaagacggcgaagtgataataaagttaacgcattttctgtcgaaattcttgtcgatggacattggattgagaaacagtggaaagatgtaagcgtcggtgacttcatccgaattgacaatgacagcctattccctgctgatctacttctattggcatcatcagaacaacaaggaatggcatatattgaaacatcgaatttagacggagaaacgaatttaaaaatcaaacaagcgctggatatcacttcaacaatgacttctccggaaaaattgagccaattcgagtctgaaatcacttgtgaaccaccatcacgacatgttaatgaatttaatggaaatattgaaattaatggagttgccagacatttcggtattgatcagctgcttttgagaggtgcccgattaaaaaacactgcatggatatttggtgccgtcatctacactggacacgactcaaagctgctcatgaactcgaaaagagctccgctgaaaagtggaacaatcgatgtacagacgaattatcgaattattttcctctttttcgttctagtcgcactcgcgctaatatccgctactggatcggaaatttggaggggaaataatattccacaggcttggtatttgtcttttcttgaacacgatccaaaaggctcattcctgtggggtgtactcacgttcttcattctctacaacaatttgattccgatttcactgcaagtcacactggaagttgttcgattcttccaggcaatctacatcaacaacgatatcgaaatgtacgatgtgaatagtgattcgtgtgccatcgctagaacatcgaatttaaatgaagaactgggacaagtcaagtttataatgtcggataaaacgggcactcttacacggaatgtgatgaagtttaaacgactatcaattggatctagaaattatggaaataatgaggatgatgagtttgcagatgcaagtttaattgaagattatcgtcaaggagatgaacattcgacgagtattctggaagtgttgaaaatgatggctgtttgtcatactgttgttcccgagaacaaggatggtcagctaatctatcaatcaagtagtccagatgaagccgctttagtccgtggagccgcgtctcaatctgtatcatttcacacaagacagccacaaaaagtgatttgtaacgtgtttggtgaagacgagaccatcgaaattctcgacgttatcgatttcacatcggatcgaaaacgaatgagtgtgatagttcgagatggtgctggaggagacatcaaactatacacaaaaggcgccgatacagtaatctttgaacggttggagcacggaaaagagcaagaagaagctgtcgagtattgtacggagcatcttgaagattatgcatcttttggatatcgtacactttgtttttcgatgagacatctcacggagcaagagtattcacagtgggctccggagtacaaaaaagccattttggcaattgataatcgtgctaagctgctcgctgatgcggcggagaagcttgaaaggaatatgattttggttggagcaactgcgattgaggataagcttcaggagtgggttcccgaaacgatccaagcactgatggcagccgatattcgtgtatggatgttaactggtgataaacgtgaaactgcaattaatattgctcattcatgtgctctatgtcatacaaatacagaattattgattgtcgacaagacgacttacgaggaaacttatcagaaattggagcaatttgtggcgagagcaattgaacttgagaagcaggaaaaaggatttgcaatggttattgatggaaaatcactgcttcacgctctaactggagaagctcggaaacatttcggagatcttgctctgcgatgtcatgcagttgtatgttgtagaatgagcccgatgcaaaaagcagaagtcgttgaaatggtccgaaaattggcgaagcatgttgtgttggcaattggtgatggagcaaatgatgttgcaatgattcaggcggcgaatgttggagttggaatttcgggggaagaaggcctgcaggctgcttcggcctcggattatgctattccgagatttcattttttgaggagacttctcctggtccatggcgcatggaatcacgatcgttcagtcaaagtgatactgtactcattctacaaaaatatttgcctctacatcatcgagctgtggtttgccatgttctccgcgtggtctggacagactattttcgagagatggactattggaatgttcaatgtaatattcactgcatggccaccagtcgtactcggattgtttgatcatccagttcccgccgaacaaattatgaagtatccggcgttgtatgcaagcttccagaatcgagcatttagtatcgggaatttctcactttggattggcctagccattgtgcattcattatcgctgttcttcttgacttacgcgacaatggagcatcaagttgtctgggataatgggctcactggcggatggcttatgctcggaaattgtgcatatacgttcgtggtggccactgtctgcttcaaagccctactagaatgtgattcatggacatggcctgtagtagtcgcgtgtattggatcgattggcctttggattgtattcgttattgtatactctctagtcttcccacacattggtggaatcggtgcagatatggctggaatggctgcaattatgatgtcatcttatacgttctggcttgcacttttattcattccacttgccacgctgctatgggatttggttattaaaagtcttttcacaatcgcaatgccaacaccacgtgaacttgctgtaatgtataacaaacggacaacatcgttcaacggattcgaacggttagccagctattcatcaaacgtactcgaaaacatgcggcttttgacatcatctctacgtggcagtaccactggaagtacacgatcaagaactgcatcagaagcttcactagcacttgctgaacagacgagatacggcttcgcattttcccaagacgaaagctcggcggtcgctcaaacggaactcatcagaaatgtggattctactagagaaaaaccgactggacgataattctgcgtttttttgttttgcttttgcttcttcatgatttatccttttttttcttttttttttcttcttcttccaaaattatgtaaaacctcatttttttcgtgtcgagaccccaaccccaaagacgagtagatttgactgtttacagagactacggtagcgaaattattacaacgatatatattttctctccaaaattgtattgccaaaattctttttcctgatcttttcctttttagtgagagtgacattttatcgattttcccctcccccccaaataacttctgccgatgaacatgttacgggcagtgagagagagagagagatattatactgtatttttataagaaatgttcgttttgctcaatttcctgtacacttagcctccctccccctccgataacttcctgtgaacatgaaatttttccaatacttttttatttaatcagttttcagttttca

SEQ ID NO: 20 - RNA, 3270 nt, Caenorhabditis elegans
  source 1..3270: mol_type = other RNA
atgcccacagaggcaagagataataatcgacatatccatcttggcaaagtcagagatccccaccaccagcatgctcaacgattttgcagtaatagaataagcacttgcaagtacaatggattctcatttcttcccagatttttgtatgaacagttccggcgttacaataatatatttttcctagcaatcgcccttcttcagcaaattcccgacgttagcccgactggaagatacacgacagccgtcccatttctgataattttatcagtttctgcactaaaagaaatattcgaagatgtgaaaagacggcgaagtgataataaagttaacgcattttctgtcgaaattcttgtcgatggacattggattgagaaacagtggaaagatgtaagcgtcggtgacttcatccgaattgacaatgacagcctattccctgctgatctacttctattggcatcatcagaacaacaaggaatggcatatattgaaacatcgaatttagacggagaaacgaatttaaaaatcaaacaagcgctggatatcacttcaacaatgacttctccggaaaaattgagccaattcgagtctgaaatcacttgtgaaccaccatcacgacatgttaatgaatttaatggaaatattgaaattaatggagttgccagacatttcggtattgatcagctgcttttgagaggtgcccgattaaaaaacactgcatggatatttggtgccgtcatctacactggacacgactcaaagctgctcatgaactcgaaaagagctccgctgaaaagtggaacaatcgatgtacagacgaattatcgaattattttcctctttttcgttctagtcgcactcgcgctaatatccgctactggatcggaaatttggaggggaaataatattccacaggcttggtatttgtcttttcttgaacacgatccaaaaggctcattcctgtggggtgtactcacgttcttcattctctacaacaatttgattccgatttcactgcaagtcacactggaagttgttcgattcttccaggcaatctacatcaacaacgatatcgaaatgtacgatgtgaatagtgattcgtgtgccatcgctagaacatcgaatttaaatgaagaactgggacaagtcaagtttataatgtcggataaaacgggcactcttacacggaatgtgatgaagtttaaacgactatcaattggatctagaaattatggaaataatgaggatgatgagtttgcagatgcaagtttaattgaagattatcgtcaaggagatgaacattcgacgagtattctggaagtgttgaaaatgatggctgtttgtcatactgttgttcccgagaacaaggatggtcagctaatctatcaatcaagtagtccagatgaagccgctttagtccgtggagccgcgtctcaatctgtatcatttcacacaagacagccacaaaaagtgatttgtaacgtgtttggtgaagacgagaccatcgaaattctcgacgttatcgatttcacatcggatcgaaaacgaatgagtgtgatagttcgagatggtgctggaggagacatcaaactatacacaaaaggcgccgatacagtaatctttgaacggttggagcacggaaaagagcaagaagaagctgtcgagtattgtacggagcatcttgaagattatgcatcttttggatatcgtacactttgtttttcgatgagacatctcacggagcaagagtattcacagtgggctccggagtacaaaaaagccattttggcaattgataatcgtgctaagctgctcgctgatgcggcggagaagcttgaaaggaatatgattttggttggagcaactgcgattgaggataagcttcaggagtgggttcccgaaacgatccaagcactgatggcagccgatattcgtgtatggatgttaactggtgataaacgtgaaactgcaattaatattgctcattcatgtgctctatgtcatacaaatacagaattattgattgtcgacaagacgacttacgaggaaacttatcagaaattggagcaatttgtggcgagagcaattgaacttgagaagcaggaaaaaggatttgcaatggttattgatggaaaatcactgcttcacgctctaactggagaagctcggaaacatttcggagatcttgctctgcgatgtcatgcagttgtatgttgtagaatgagcccgatgcaaaaagcagaagtcgttgaaatggtccgaaaattggcgaagcatgttgtgttggcaattggtgatggagcaaatgatgttgcaatgattcaggcggcgaatgttggagttggaatttcgggggaagaaggcctgcaggctgcttcggcctcggattatgctattccgagatttcattttttgaggagacttctcctggtccatggcgcatggaatcacgatcgttcagtcaaagtgatactgtactcattctacaaaaatatttgcctctacatcatcgagctgtggtttgccatgttctccgcgtggtctggacagactattttcgagagatggactattggaatgttcaatgtaatattcactgcatggccaccagtcgtactcggattgtttgatcatccagttcccgccgaacaaattatgaagtatccggcgttgtatgcaagcttccagaatcgagcatttagtatcgggaatttctcactttggattggcctagccattgtgcattcattatcgctgttcttcttgacttacgcgacaatggagcatcaagttgtctgggataatgggctcactggcggatggcttatgctcggaaattgtgcatatacgttcgtggtggccactgtctgcttcaaagccctactagaatgtgattcatggacatggcctgtagtagtcgcgtgtattggatcgattggcctttggattgtattcgttattgtatactctctagtcttcccacacattggtggaatcggtgcagatatggctggaatggctgcaattatgatgtcatcttatacgttctggcttgcacttttattcattccacttgccacgctgctatgggatttggttattaaaagtcttttcacaatcgcaatgccaacaccacgtgaacttgctgtaatgtataacaaacggacaacatcgttcaacggattcgaacggttagccagaaaacacgtgcacctacataccataatagtagccattgaacgacggttaaaagccgtatgcgaatgggtttag

SEQ ID NO: 21 - RNA, 4705 nt, Caenorhabditis elegans
  source 1..4705: mol_type = other RNA
attatattaattaattaatttccaacaaaaaaattggattttcctgcaggctcctcgtcattctatgaccgaaaatcgataatttgtttgatttttcataattcaacaaaaaatcgatagcaaagaagtcgaggtcaaacactttttggagcataatgcccacagaggcaagagataataatcgacatatccatcttggcaaagtcagagatccccaccaccagcatgctcaacgattttgcagtaatagaataagcacttgcaagtacaatggattctcatttcttcccagatttttgtatgaacagttccggcgttacaataatatatttttcctagcaatcgcccttcttcagcaaattcccgacgttagcccgactggaagatacacgacagccgtcccatttctgataattttatcagtttctgcactaaaagaaatattcgaagatgtgaaaagacggcgaagtgataataaagttaacgcattttctgtcgaaattcttgtcgatggacattggattgagaaacagtggaaagatgtaagcgtcggtgacttcatccgaattgacaatgacagcctattccctgctgatctacttctattggcatcatcagaacaacaaggaatggcatatattgaaacatcgaatttagacggagaaacgaatttaaaaatcaaacaagcgctggatatcacttcaacaatgacttctccggaaaaattgagccaattcgagtctgaaatcacttgtgaaccaccatcacgacatgttaatgaatttaatggaaatattgaaattaatggagttgccagacatttcggtattgatcagctgcttttgagaggtgcccgattaaaaaacactgcatggatatttggtgccgtcatctacactggacacgactcaaagctgctcatgaactcgaaaagagctccgctgaaaagtggaacaatcgatgtacagacgaattatcgaattattttcctctttttcgttctagtcgcactcgcgctaatatccgctactggatcggaaatttggaggggaaataatattccacaggcttggtatttgtcttttcttgaacacgatccaaaaggctcattcctgtggggtgtactcacgttcttcattctctacaacaatttgattccgatttcactgcaagtcacactggaagttgttcgattcttccaggcaatctacatcaacaacgatatcgaaatgtacgatgtgaatagtgattcgtgtgccatcgctagaacatcgaatttaaatgaagaactgggacaagtcaagtttataatgtcggataaaacgggcactcttacacggaatgtgatgaagtttaaacgactatcaattggatctagaaattatggaaataatgaggatgatgagtttgcagatgcaagtttaattgaagattatcgtcaaggagatgaacattcgacgagtattctggaagtgttgaaaatgatggctgtttgtcatactgttgttcccgagaacaaggatggtcagctaatctatcaatcaagtagtccagatgaagccgctttagtccgtggagccgcgtctcaatctgtatcatttcacacaagacagccacaaaaagtgatttgtaacgtgtttggtgaagacgagaccatcgaaattctcgacgttatcgatttcacatcggatcgaaaacgaatgagtgtgatagttcgagatggtgctggaggagacatcaaactatacacaaaaggcgccgatacagtaatctttgaacggttggagcacggaaaagagcaagaagaagctgtcgagtattgtacggagcatcttgaagattatgcatcttttggatatcgtacactttgtttttcgatgagacatctcacggagcaagagtattcacagtgggctccggagtacaaaaaagccattttggcaattgataatcgtgctaagctgctcgctgatgcggcggagaagcttgaaaggaatatgattttggttggagcaactgcgattgaggataagcttcaggagtgggttcccgaaacgatccaagcactgatggcagccgatattcgtgtatggatgttaactggtgataaacgtgaaactgcaattaatattgctcattcatgtgctctatgtcatacaaatacagaattattgattgtcgacaagacgacttacgaggaaacttatcagaaattggagcaatttgtggcgagagcaattgaacttgagaagcaggaaaaaggatttgcaatggttattgatggaaaatcactgcttcacgctctaactggagaagctcggaaacatttcggagatcttgctctgcgatgtcatgcagttgtatgttgtagaatgagcccgatgcaaaaagcagaagtcgttgaaatggtccgaaaattggcgaagcatgttgtgttggcaattggtgatggagcaaatgatgttgcaatgattcaggcggcgaatgttggagttggaatttcgggggaagaaggcctgcaggctgcttcggcctcggattatgctattccgagatttcattttttgaggagacttctcctggtccatggcgcatggaatcacgatcgttcagtcaaagtgatactgtactcattctacaaaaatatttgcctctacatcatcgagctgtggtttgccatgttctccgcgtggtctggacagactattttcgagagatggactattggaatgttcaatgtaatattcactgcatggccaccagtcgtactcggattgtttgatcatccagttcccgccgaacaaattatgaagtatccggcgttgtatgcaagcttccagaatcgagcatttagtatcgggaatttctcactttggattggcctagccattgtgcattcattatcgctgttcttcttgacttacgcgacaatggagcatcaagttgtctgggataatgggctcactggcggatggcttatgctcggaaattgtgcatatacgttcgtggtggccactgtctgcttcaaagccctactagaatgtgattcatggacatggcctgtagtagtcgcgtgtattggatcgattggcctttggattgtattcgttattgtatactctctagtcttcccacacattggtggaatcggtgcagatatggctggaatggctgcaattatgatgtcatcttatacgttctggcttgcacttttattcattccacttgccacgctgctatgggatttggttattaaaagtcttttcacaatcgcaatgccaacaccacgtgaacttgctgtaatgtataacaaacggacaacatcgttcaacggattcgaacggttagccagctcctgggccgcctatcaaggaccgacaaaagacggtgcacacgtgttcgccaatcgattcagccttcgaaaacgaattcagccgacgtcgacgacggcggcatctcatccaagtgctacatcaccgccacctaatggctacgtcgagaagtcacagttgaatggaaaaaatggaaaacatcatcgcgccaagagccccgactacggtagcaccgagttgtccacgtggagtacacgtgacgagcatgaggtggaatacaagattccacgtggtcggaaagagcggagctcgtacacgaatcgcgcgttcatagcggaggataacaatgtgacgagcattgtggtgaatgatgaagaagatggtagtgggacgaggttatgacacagtaatcctcctacagtaatcctcctacagtaatcatcctacagtactcctcaagcaaacttttctatcgactattgaaacacgtgcatatcaatcatcaaacgttttgaaattctatccgaattctacagtaatcctcttgcattgttctctgcaattcgtcataatcataatcatcatcgctggagctacagtacccttcacctactaccgtattctacattccccccgattgacacctaccgtaatctatgtctacagaagaatctactgttatttttcgctattcatcaaacgtactcgaaaacatgcggcttttgacatcatctctacgtggcagtaccactggaagtacacgatcaagaactgcatcagaagcttcactagcacttgctgaacagacgagatacggcttcgcattttcccaagacgaaagctcggcggtcgctcaaacggaactcatcagaaatgtggattctactagagaaaaaccgactggacgataattctgcgtttttttgttttgcttttgcttcttcatgatttatccttttttttcttttttttttcttcttcttccaaaattatgtaaaacctcatttttttcgtgtcgagaccccaaccccaaagacgagtagatttgactgtttacagagactacggtagcgaaattattacaacgatatatattttctctccaaaattgtattgccaaaattctttttcctgatcttttcctttttagtgagagtgacattttatcgattttcccctcccccccaaataacttctgccgatgaacatgttacgggcagtgagagagagagagagatattatactgtatttttataagaaatgttcgttttgctcaatttcctgtacacttagcctccctccccctccgataacttcctgtgaacatgaaatttttccaatacttttttatttaatcagttttcagttttca

SEQ ID NO: 22-23 - skipped (2 entries)

SEQ ID NO: 24 - DNA, 1380350 bp, synthetic construct
  source 1..1380350: mol_type = other DNA
aggatttaacccaggagagccgctggtgggaggcgcggctggcgccgctgcgcgcatgggcctgttcctggcccgcagccgccacctacccagtgaccatgataggtacgtgggtacctgccaggtacagcctctctgcgccgccccacgccccggtatggcgccacgccccgcctcggccgaccaggacccccggtgccaactgtcaatgacggggccaaagtgcccgtgccgtccccggcccgcgccgccgggctccccagctcagcgacgcgggtccggggccccagtgtgtgcgttcgaagccctcgcctgcccgcccctgctctgagcgttctcatgaagaccgcctcgacggggacgccaggcggccccgcacccccgctcctcgttcgcggtcccccggaccgtgtggggtcccgaagccttctccccgccgccgcccctcaccttcgccccgccgccgcccctcaccttcgcccctcacctcactggccggttgtggtgcggttcaggacccatcgagacccactctctgtggggctctttcaggaaaccgcagcaaagcattaaactctaatggaaggcacctggtgagggtggctggctccacagaaactcctccagatagatctaaacttgctccctcggatgtttccttttaaacttctcattggagggctgagatgaaagaaacattaagagtaaatagtagccaagattaaatctattgccttttgcaaaataacctttcttttttttttttgtaaaagaacgaccgaggtgcaagtttgtgaacgaaacttagtggcatcagagttgttcatgaacacttgatgtgtaagatgagcaaaggtcctctcttccagggttgttgagccaaaagttactttaggggctatccctgaaaattaatggaaatgcaccatatgtttgaaaaacagtgctagatggggtttcattattgtggaggtttctccaggttatgtatggagggtttagtgagcttgtttattcctgaggagggtcctttacaaaacacttttgattgcagtaagtacgttcgaagtcagatgtggtctgtccagaagaaagatgagaggtggatttataaagtatatgatctttatgcactgaaaacacttcttacatctgtttatttgtgaagttattgttaaaatgtaaacattctccccatcagtgggagaatcaagccagctaactggcatggtctttgtggtaaaacaagaatgttgtccaacttttcttccctttctagcatggtctgacttttggtgaatgacttgaaagttaatcaaattacgaaaaaaatattttttatgagtcttcttgagctctttttaggtgacatttacgtaagattcacttgcaagcacaagtttgaactgaatcagaaaaccaagtagaagagattttccaatatctgtgctgtcagtctacaggaagaaaatagcctataccttattttgaagacagttaaatacattttattttaatttaacttaatctagtgcacagataattttaagagaaacaaatttattgtaaagctatataaagacaagcacttaagatctaaagaacattactcagttataagttatgacctaataagtgattatataaataactttattaggatgaaatgtgtttggacagttctgtttagttttatctggaattcttccaataaggaagaaatatctttggagttgatgattaaacagttatcaattactggtaatgacatggagaatataaggttggtttttaaaagtgttatttctctcactccagccatggttttacatagtgcaaataagtgtgcagtacaacataaatgattaaatccatgcctgctttccctaggaaatgtgccttacatataagatcatggacaatgtgcaataaaatattcaactagttgcattgcctaattctgaaattagacacacgtcttttttttttttttttcctctttttgagacaggttctgtctctgtcacccaggccggagtgcagtggcaccatcacagctcactgcagcctccaactcctgggctcaagtgatcctcccatctcagcctcctgagtagctgtgactacaggtgtgtgccaccatgcctgccaattttttgttatagtttttgtagagatggagtttcataatgttgcccaggctggtctcaaactcctgggctcaagcaatcctcccgcattcgcctctgaaagtgctgggattacaggcatgaaccaccacgcccagcctcattagccacatttcagtaaacatctgaatggtcagtttgggatttgggtgtcgtgaacagtgctaaaggtaggtgaaagtgaaaaccattaaaaggaagccttggagtgatgggttttgtgtttttgtgacaaaaattcagagccaggaaagacattatagactttatccagtgatcactaaaatgtaaatagtatgtatctgggattttctgttaaaggtaagagtgcttctcaaagcttgctcctttcaggcctatgctttctctaactattacactcaccttgttgcgggattcgggagtatgagggagacctcaggttgaagcaggagaatctttattgagtgtactcaggcccagctgactcacatccaaaagactgggcccagaataaagacagtacttgacttttatacacacttcacaaacggaggtgggctagcttgaagcaagcttacagtggcgtgaaagcagggatacagaggcaggacaaagacaggattgcagatgaccattgccaagcaacccagatgttcgttttctaggtttgcctgggcacaggcttatcctataaccttctctgtggtgcccaggcagctgtagttcaggcctactcaggctttttatgaccttcgttgtactacttagataaaacagaatacttgaaatcactagttacagagaacaagagtctataaactcattctgtaaaacaaaggaaaatttgtttttcttctccctgtgttgagggagtgctgagagagtctccagagcatattagataatattatcaagacttttcctgggtctaggctgtgcctgttgctgcttctggaacaagttagcctaaaacaggaaaacttatttctctttctttttaattttattgttctttaatttcccgcctcaaccttactgcgaataatattctgccactttatttaaatcctggcttagtttaaggagaaacgtaaagatgggtttcctggtagaataggagtaaacaggactgactgtgacctcactgctaatgacatgtaccttccttttactttctcaaaaccgaagattcccttattggcatgaggactgtttcaaaagtacttacatttcccacctgcattgtgattgatgtgttgaatgccctgacccaggcagctacagaaacataatttaattgaagtcggttaaaaattgtgcctttgtggaaagtgtggagaaggacttcaagatgatataaagcagaatagaaaagcttaaaagaattcaatttagaaaaatgtaatttttggtacctctattaaaaatatattttgacttttttaaaaatgagcaattctttgtgtttaaaatggaatgttagtggggatatttgtggtatgttctaaatgttctgtagaactggatttaggtatttgagtaacagcagatattagagtgcatggttatatatacaacaatgttgtcagtattgaaatacacattcagtgtcttagacttttaagaagatttttgattgacaaaaaccattcattggaacatagtctcttctataccttgtttcacttagcatctctttgagaatttacatatctgcatgtccagatccactccacagcgattcctgcctagtcttttataggatacactaattatgaaaatatttaccaataaataagcactcattaggtttacagacaactgttgtcagaagtgtttgtggccatatctttttacttgcacatgtaagcatagatgtaaaataaaaatcgtatgacaatttgagttaaagagtttgtagattttacattttcctaggtatttcaaaatttttccaaaataagttgcccaattttacaagcctatctaaagcctccactaatacaacatggtagtaaagagctgccctgcccctctgggctgaaaattgccaaaagacgtccttcctgagactgactcagctttcactagcagaacgcctcctggatctccggtcccccacctctctctcaccctaggggtagtgcctttcagtgtacaagctgcacaactgtccttggtggccctgccctccctttcagtgtgtataagagtgcccatttcctcccatgtgccatcgaagattttttatttttgccgtcttgacagatgaaaaacagtatcttttaacttttcaaattaatttagaagaaaacttctcattctcatcttatagtgcgttagttttgcaaaagcagatccagtgattccagcacctgctatgtacccttaactgctctaggtgccagggaaacgagggaacacaacagaaaaagtcccttgccatcaggaatgtatattccgacttcaccatttggctacacatctgcatatttgttttcaagcttgtgtgcagtgaattttaaagtctcaatttatatttctagttgaatatactgtgtactgctctttgccctgccattttgataagttgatgaaaaccagctctatgcctaagtaccccaaagcttctgtttataatgaggtaaaattgtgtcaaaaataggctctactaaagttttgcatagaagattttatgtaattatataatagttcttccttgggtccaaaggctctaaaatgaccctttgccctttacaattttggccctatttctgaggatgtttttgaagtctgcattttttgaaacctcatagtttcattgcctgaaaatgatacaatgaaagtactttgtattaagatatgtaaatccattcctacctccaaagtttctttgaaaaatgcaaaaaaaagagttcttacttcgaaatgcttcatattcatgaaagcagttttaatgcaaaatactttattctgttagctattagttctttgatcaatgaaaattgtttcttacctgctgtttctgcagcctttaattgtagcccagtgcttattcaatgtttctgttttaatttgcatttaatgagctcattttaaatgtttcttcgtagtaatctgaatggtttctctccctcaattttgtaatattaaagagactcatgtgacagtcggctgatttatgttgcagctcacctccctggcttatttacttcatcctgtagcatagaatcttggttaaaaggaattacagtaataggattcttttcccccagtaatttcctaattacctaggactcttaacagattaactcaaatgtctgtttttcaccaaatagaaaccttttttccttgaatgaataggtatttatgattattatttcagtgtcatttctttataccatatgtattagatggtgctgggtagggatgggtacacataggttgtatttgtctatatattgcctgtggggaaggtacatagaaatgaccatttcttcccaataagtttgtggcctagttgggctgattaggcttatattggtggtatagattgcaccttcaccaccacagaagaagagtaattagaaagatgtatgtacatatcagcacacacatacatgcctgcaacacgtgatttttcatgtttcttttgttcatttgattctcgttgatctgaatgccctttctttctgttgaacatctcaaaactactgttcatcactcaagatccagttccaatggcaccaactttatgtgaaattttccatgtcacctcttaccctctttttagtgtgaggcaattagcacctcctttagagtcagccaacattttagtaactacccttcatcaggtccttgttcatagtctagaaggggtacagaaaagtaaagatttacaaacctgaaaggtgggtatcataatataggtttatacaaggaagtactggaaaactcagcctatagagcttggaagatccagctgtttcccagtggagccattccagttttcctgcaggacaagtaggagttaactaggtgaaggcggccttctagacaggcatggaggggagagaagagaatagaatgaaaggtatctggtgaggctgcaggcacaccagataagctttgtcaaggaggtaggtttaaagttggcgatagggaggagtcactgaaccattatctacaaaagagcattatgaacaggttgtattttagaaagatgtctgtggcagtactagaaagttatgaaatagaacgttgtagaaaatagttacactagtgccagcaagtccagataaagtgttaatagaggacttctcatgaccttcattgtacttcttagataaaacagaatacttgaaatcactagttacggagaacaagcgtttataaactcactccataaaacaaaggaaagaagtccagataatgtttaatagaggacagtcttcgactgagaatggcagggtaattgtgcagtaggagatggcttttctcagggtgttgacattgatttgatatgtcattacatcatctctgattaaaggccatatttctttttaaaaagttcttatttttgtagaatagattaatgtctcttattgacaggtgttttatttcatgttactaaagctttatttgtattccaaaaatagtttgtatctccttctttgatatgtggaacatgatgcttagggttctatttatagtttcttctctgtgtggagagaacaatgtcatcagagctgtggatatcgtgtcacccagaatagtgcagaatagtttcttcctcttagatatctgcatgactcatatacctaggcacatattaagaccatctatgggccgggcgcggtggctcacgcctgtaatcccagcaccttgggaggccgaggcgggtggatcatgaggtcaggagatcgagaccatcctggctaacaaggtgaaaccccgtctctactaaaaatacaaaaaattagccgggcgcggtggcgggcgcctgtagtcccagctactcgggaggctgaggcaggagaatggcgtgaacccgggaagcggagcttgcagtgagccgagattgcgccactgcagtccgcagtccggcctgggcgacagagcgagactccgtctcaaaaaaaaaaaaaaaaaaaaaaagaccatctatggacagatgtgtgtatttttaagagtattgatggcttcttgatgattctctccaatttacttttactgtaagacctgaacagaggcccccataaagtttcacatgagagcccttaactttggaggagagaatgttcaatagttagcagcctcacccattttgcacatctctactcctaccctcatcaaatgagggggaaaattggtgattagggagttaatattggtgtcctgattgagactttttattatttatttacataattgttgaatacgccagttactcctattgtgagatatttttggagtttcagtgcataaataagatcttgtgatgaagccctctgtaactgcgtagtcatttttaaagcttattgtacccgcagagtagatccattttccagatcatgaaatgataggaagtagacacctgaaacttgctcgtattaataaaatggagaaataggaaggaacatttgtaatatctgtgtttctgaggtcaacctttagtttttttttttttttttttttttttgacatctacctgcactccctcttttctgtcccctcatttttttcttacccacattccttgattttctcagaagctggaatttaatatttcattcttcagctcaaaggagcagctgttgtctgaacaacaggtgaatttcttccttacttgttgccacagggcttgactgtgggttgtaatgtttctgagggttatcacaggagtggcctgaccggaacagaccaggcttcaccacagctcctactggagacattccctagattgggaattgtctgcaatggaaatctttgtagtctctggctctgcattttccttccaggcaaatccagtcctgattacaattttttttttccattgaaacaaaattgaggaatgatgaactctgggcagctagaggatgggggcaagttaggtttgctccttggagaattagacagatttaagaataatattccctgtgccctgggtcttctctccacccttgaaattcgacctcctttctcctgaaagtcctttatagctctctggtgagttcccagagtgtgagaggtacagatttaagcacaagtgaggtcatgttctctgaggtgctgcttctctgggctcctgaccacagacaaatgtagactgcatgatccagttgatattcaccaaatttgtataattacatgtgacaatatataaagacgtttttacatgaatatgtctgaattcataggatcagatgggaagtatatgtgttttattgggcagtcaatttagacataatcatatgatacagagagtgatatttcgtagagatctgttgtgggctttccactcttgttcatttaggaatctgtgagatgctcaacctatgattggaattggaatttcttccttttgtccctctctagagttttctccattattcattgtccctttctcgtgtgtgtgtgtgtgtatgtgtgtgtggcatctgccgtgtctcactacatgcagagcttctgacataggtattgacttttatatcatcttgatttcaaagaagtcaccaaataatcttattctcagtgtcttgagttttataccaagtctctgtgcttgttttttatgttctggcaatttctgggcattgttgcccattttagaactctattttgttttgtgggggacagttctggaataaatttttttttttttgagacggagtcttgctgtgttgcccaggctggagtgcagtggcgtgatcgcggctcactgtaagctccgcctcccaggttcacgccattctcctgcctcagcctcccgagtagctgggactacaggcgcctgccaccatgcccagctaattttttttgtatttttagtatagacggggtatcaccgtgttagtcaggatggtctcgatctcctgacctcgtgatccacctgtctcggcctcccaaagtgctgagattacaggcatgagccaccgcgcctggcctctggaataatttttaatggagattcaacatctaagaaactttcatattggatcaagacatagttgtcacaattcttagtgtgtaaattcattaaaagtcccttctggcttttgcagccaatttaatcatcttatgcttaatagaatgcaagttatacaggtaaagtcagtcagagaggggatggggatgctatttgagatgaagttcctagaagtaataagattttttttgtcttaaaacagtgatgataggatgattaagtgatctaagatggacaaatatgtgtgagttcttaataattgggaaagatcttttttaaaaagtgttaatgtgaccatttagttaccataactggaaactagatagcattaggggccatttgtatatgtaaaaatatcaggaagtataccggcaaattatatctttgggttgtgggatgttttcttttattatgattgtgtttttcagatcttcagcgttaagcgtataatgttttggaaatactgaaaagcaatgtgttataaacacaatcttcaggacaaatgcattgtggtaatacatttaaaacggattctacttttgtgtcaaattatgtcagataaattttcaatggtagcatactatgctcatgttctggtcataaaagtagtgttttcaggaaaacaaacattagaaccataatttcactttctttaatattatacactatcggggcatggccagattactgtattagtttttgtgtagttcctgttgttgctgtaacgaattaccacaagtttagtgacttttaaacacaaatttattttcttacagttctggaggcccaaagtccaaaatgacttttttttttttttttttttgagacaagatctccctctgtcactcagactggagtgcagtggcacaaacacagctcactgcaaccttgaattcctgggctcaacttcccgaatagctgggactataggtgcatgccaacctgcctggctaatttttttattttttattttttgtagagacaggatcttgctatgttgcccagactagtcttgaactcttgggctcaagtcatcttcccacctcagtctcccaaagttgtcagattacaggtgtgagccactgtgcccagccccaaagtgactaaaagggactaaaatcaaggtgttcgctgggctagccccttccattaatagaagctcctgtggagactcctctttcacttctggaggctgctggcattccttggctcctggccacatcactccagtctctgctgctgtggtcacattgccttctcctttactgccatcaaatcttgctctgccttcctcttaaaagaacacatggggttacattcaggagccaccaggatagcctcttcgtctccagatccttaatcacatctgcaaagtcccttttgtcatatcgggaaacagtcgtaggtttcagggacaaggaggcattattcagccaccacagttaccagtaatgcttcaccatttgaacgtatggttaggtacttccttatgaaggaagaatgacagagagctacaacttgatttttgcctattgtgaggtcacttaaaggtaatgcagtagtgttacacatgaggagtctgtgtgtgtgtgtgtgtgtgtgcgcgtgtgtgtgtgcgtgcgcgcgcgcgcaggcgggtagggtgtatggactagttgatgaagctagccaaggacataactcacttttcaaggtagttttctcaggtggcaaaagaaggtgtgaatattctcctggactcccatagtgcattgcagctgggtaatttgatatgtaccaggttgctaatttgtatcctgtagagaaggggaagttttgttatgctttggacaggagataccacttcacataacagatgatcaggcaaagtggaagcaaataaccattatgtgtatattgctttctgatttgacagttccctatgagcgttagacacttcatgctccctggaatagtttaacattgtcctgtcctttgtaaataataactaatatgggttggttgaaaattatacagttagaattttaaattattaagttgagaaggacgaaagagcgaaatcttgtaatttctcacagatgtcagcatagaatttggtttcttgaggcagttttaacagaaacatttggaaaatattcccttatacattgttagtacagttaggagaaactctaatatggaataaattttttaaatagatgaatgcagaatttggtttttaaagaagaaaacatttattttttgctgaaaaaagaaaatgttaaattcggcaaatatttattgacaccttaaattataggatttatgataggcactaggcgtgcgtatctaaatgaggaagtcacagttagtgaagatgctgtgtacacatggaaagtaaccattgacaataatagatgttatcatggaggtacgcttcattgtgtgataaagcaggggaaccttcagcagaggtggaatttatttgagctggatcttaacaacagactggactcctgagcaggccaagaaagaaagcgcgtttgaaacagagaggctggccccagcaagatggcaggcttgttagcagaggctgtgttgggaaggatgagtagttgacgggatggagtacagggagcatggagtgggaggtgatgatagattagggtgtcaggaccagctcagtgcagttttccatgccatactggagaattcaggttttgctctgagtaatgaggaaccgctcaatcttaatgctaggaactctaaggcagtaggaagtggctgtgtcttgtcgctgaaagtgagatgtgaattcaaatttgaaatataaaataaaattgccagtagccaaattaagcacttggagctattacacagcttcccacttaggatctttaaactattagggcaattagctgtactttaatataatcagaagaaacaaacccttcaaaaggtttgtgtacttcagactgtcttgacagagttattttcctctaaactttaaaaaccgaatttcattccatctttatagtgtatctttacttacctgccttattcttgagggaataagcgtgctcatacttaataaataattgttgcctaaatgaaagtgtgattcaaaggagagaagacctttgtccttgcctccggtttgtcttcttccatgtcccttgaggaatccagtctcttttgatattaacctttggggtggggccccacttcatttatctttggggctcctagcctagcagaatcccatcaggtgttgagatgggagaaaaaaattaacaaataggggaagtaactatatgccttgactttggtgaaaattaagtatctgaggagatggttcattaattttaagagagagagctttgtctgtcatcttttccatgcaaatacctagcacaaggacgatgactttttcctttcttctttttttcccttgtcctttactgttgtttcttcttactgcttccttaatgcttgcccttagagggaagtgcttaaattatttgaattttggaagaagtagagatttttaaaagtggttactctatgcagcaggtttagggtgtaaattacgtagatgctttgtctcttttccacctttagcttttaactttacaacaaatgcacttttgcttcattggggtctgtatttacttgtttccctaatgcagcttttctccatgaaatgctctcagtagaaacatatgctcaaagcttcagagtaattacaatatcactaaaaggttcgtaatcacattactgaaactaaatgttaaaacatttgatttttcttgatccaatcatttcaatttaattctaggctactccgtgattgatggaggaaacatggcaggccaaagtcagggggtatttataatgccaaaagccttggagggaaaacctcaaggcaatttaatttgggtgggagctcatttaaattattccgaagggttttttaaaaaatgggaagagcaggtttgtttcagtgcctgctctcagggcccctccctccctgtcaccagtgtccctgcatctcctcagcccctggttagacaaaggccccgtgacgcaaagcaaagaaggaagtctgatttttttcacaattgttctaaagatgttcttttgtgttaaagactggcttaaacttgaacgtttttcttgtaaatcaggggtagttttgagatatttgcgtctgtttacggtaagcaagcacacctccagcagggccaccacataattaagtcacgggacatgccgacagcctcacttacccatgaggatgcagagtggtgtgaataaaaaatctacctttacctcattgctcacagcagggcggagaaatgatcaaacgtcacattcctgatggtggctgttctgaaaaaccatttattttatttttattgaattacggagacaagtgaatgtgaaatttctgaagcaatgtgaattttcttaatttttagcacagtttgttttaatcatatacattacagagcagtcattttagaatatttactgatttgcctttgatatctgctcagctagaggtctggatataatgctgagttattttaataattagcttctataattctgcttctgaatggttatttcatcctgtcttttaagttctttttttttgcttttacaaaacagtataagtatagctaacagacaaatattttgccaataatcatacataaagcacttggtgacatttgagtctttttattaaatttctgaaggtgaattttgaaccctaattgtaggatttttgataatgggatataacactatgatatttcttaacactttttattccctgaatctggcatactttttctgccttccctcccttgtagcaaaagagacctaattttttttttttttttttttttgaggtggagtctcactctgttgcccaggctggagtgcggtggcgcgatcttggctcattgcaagctccacctcctgggttcacgccattctcctgcctcagcctcccgagtagctgggactacaggcgcccgccagcacgcgtggctaattttttgtatttttaatagagacggggtttcactgtgttagccaggatggtcttgatcttctgacctcgtgatccgcccgcctcggtctcccaaagtgctgggattacaggcgtgagcctggccaaagagacctaattttataaataccagtttcttgccattcttccacctccttgaaggtaggttttttgtttatttgactgattgattctactttttgaaatcaagtttggaatttaaaaagtatattgcccatgtctagtagcacttcttattcactttctttcacatctcaaatcacccttccgttcaaactataatattacagcatctcatatacttagtatttctcctccacactctagtgtggtgaagtggtggtaatagtgccccttcagaggggttttactctggaggaaccggaactgaagtgagtaaccctagttttatgtggaggtttcataagtttgttaggcctggaaaatggggaagtgaccctggtttttacattcatatgttaatagttttctcttgcttccatgaaataatctcagaagacaggttcaactttaggacagctatgtaacttcatgtttggacattaagtatggggatgattgtcttaactaggtttctatcatatgccctatgtggtgcaagccagagataaacatgttggatctgggctttgctttttaccctacttacaaactaatgagttagcctgtttatatcatggagactggcaaaagatatgagacatgggtcagagattaaggggctttattactcatagtatggcaagttgtataagcgtcatgatatttactctagttcctttgcccctgaatctcacggggtgatgtgatacagcccagatggatgctgtgcatgcagtaggtttgcattgcagatgatgactgctgagcttagggaatcttccatttttatagcaagcagtacctatgctctttgtctggggttagacattacttcattatttaaggttatcagatgtataaacagtcctgagaagtggcccaggtaaaagagcagtcaggacaatgcagtcttgagaaatggcccaggtaaaagagcagtcaggacaatgcagtcttggtatcccaacaagacatgcagggagtataagaagaccaaggaaaactgtctctatccatccccatcttggcttttggtaaatttttacatgaataggccacctgtagtcactctgattaatcggaccaacagaggttggaaccaaactagtcaacttgtctcataccagcatttaattagggcaacaatcaataaaatcctaagcagcaggatgaagccaacctgcagtattgacttcatccagtctctctgccttccccgaccagaatctctgattcagcctactatgaataaatcccagagggagaccagtaggtcttaattcagacggtgcaagacaagtctgctacctaatatgatctgcgcaagaaagtttgcaatgacttgcccctcttgggtctcattgtcaatgataatagctgtttcagaaagcaaccctcatgcctaatggagagacattctgtggcctactttcccccatatagagagcacaggccactctagtttggaatttgttgctacacttgattggaatcagcattacactggtttgattaagccacatagtgtcactgagttgctgcaatctagattgctaaacatggcattagctacggctgcttgggaggcaggagaagcctatgaatttgtatgtcaggttggaacagtgttgaagcaatctgtgtttgcacaggtctgaggggaagggccacgtttgggagatgctgttggtggcatcggcacagcggaatagttcagggccagccatgtccacatgacttttcctggtttttttttttttttaaatagcagttttgaccaacagcttgattccagttggtctcatcagagaataagcacttactgcaggcatctgtatcagtgacactcagaccaatcagcagccaagatttgttttcaaaatgtgtagtcctacagaggggctctttaatctgccagtctgtagtcttccaaatggcaaagcagacaagtcatttacagcagtccaagagtctgtaaaatatgaaatgcctggtctttaggagcattgtctgacaagggtcagagctctcatacagagaaatgtgctgactggtccttttggctgctgctggtcagagaccaccatcggcttttagcttcatcaaactgtcagtgaaccaggccatccgtgatgggaacctctgagagccttcttgaaccagcagctctgtttccagtagtggagtgggggatatggttcctccaaagaagtagctgccattattttcatttaatactgggtgatgctagggctggatgcactgtgcccttgaatataccatttccatttgaccaggaaggcctcttaggcccttcccacctctttagggagattcacctgaaaatgggatttcagctgttcatttttctccacaagagcttagttgcaggataacagctgcttttttgtttttttttaaagtactttgtagctccatcaaacaggtgatgctattatagtgggcaggggcctctgcagcagttctggaacatgaaaagcccttctgacacttcagggattaggccgtgcaaatgtgtaatacatcagttcttattatagaattgaatatgggagctgctaccacaacaccacattgaataagcccagagggcacctttacaaggctagttcacctcccctttcccactgggaagcactaaaccccattagtagagttcagtgtgcctttcttccatgggccaggaagaatgggaacttggactcataacagttgagttcctttcttcctcatcataccaaacagttgtgtgtgtgtgtgtgtgtgtgtgtgtgtgtgtgtgtgtgtttgtagggggtgccaggggctttctgtcccctggggatagggagatcttaaacccagcccagtcatccttctccttaaagcagctgagttcagaatagagggaagggagggatcaggtagtatgagagggacagcagctccgtgttaatcaacaaggcacatttactgtggctttcaagcagcagcctatgtgaggcttaaccagacttctaaagttgatggtccgcacaaagacctatatcaggtaaaaaggtcattattattgagacactgtgtcagctttgaggacccctggctcagcagccacacccacattgtctttcttgctgcccccttgtcatgataacaccccaacccgtggaggagaatgagtgagcaatatccacggttccgtttacatactcatttcaatcttgcctctcttagcctcattagcacacaggacagtagggacccttattcccacccaccacaccccactgtccacctcctaggcaagagcattcgctctcagattccagggagatttttttatattcctggacccaatctctggacacttttccttccttctccagatagctatgttccttcaccaaaactgtcaggtctgagatatcatcttaccctatttggaagctaatggtatgtgtatcgtttctcatacattttagccagttactgtttcatggttactggcagaagacatgagacttccgggtcagaaagaaaacgttttattacccttggcacaataagcagcatgagcaccagcatattggcatcaattgcccttgctttcaattcctatggtccggatggatgctatgaatgagtgagtttgcattgcaactaaggaactctgagtttggggaattcactgcttttataacaagcagtaagtcagtctgctgtttgtccaaggggagaggttgcctcatctctcacctgcgaaagcaacctgagaagtagcccaggttattaaaaaaaaaaaaaaaagtgttcagacccttgatgtcttggcatacccagtaagacagtagtctccaacctttttggcaccagggatcggtttcataagacaatttttccatggatcagggcgaggagggtggtttcaagtgtaattcaagtgcgttacctttattgtgccctttattacattgtaatatataatgaaataattatatattacaatgaaataacaattcgccatagtgtagaatcagtggggcccctgagtttattttgctgtaactggacagtcccatctggaggtgatgggagacagtgacagatcatcaggcattagattctcataaggagcctgcagcctagatccctcacatgcagagttcacaatagggttcacgctccggtgagaatctaatacctctgctgatcagacaggaggtggagctcaggtggtaaggcaagtgatagggagcacctgtaaatacagaggaaggtttactggctccgcttgcccaccactcacctcctgctgtgtggcccagttcctaacaggccacggacccctatggcctgcggcttgggggcccctgcagtaagatatgtaggcccagggaagactgctctcccaacaaggctctttaggtctctgactctatgtcagggcagaaaggcagtgttatttctgaaggtgcctggaatggggttaggccagtggtcgaaaatgagtaacaaacgctattagatttttggcctttgagttagtgaaataatagatattttcaaagtgggagaaaatttggagtatagaagagaaagaggctaatcaatttcatgtttcatttaatgtttcatcactgttaagaatcagtgtcatgaaagccgtgttaggttgtttcaaaggaagcagctttcctgcccatttccagtttattgacaatgtaaaattgtcttgctatgtttgcttttctgcaatacttagggaaattttattttatattaactttataaatggtaattaagacaaagatatgatttctacttctattatcttgaatactcatctccgtttattcacaggccttaattgggacataaaatctgtaagttcctagcatatatgtctatgtggtttctcatacagttttcagatatttttatcatcaacattcattcagttttcttggggcacagctggattgagtcactagccatatgaaaaatcaaacatagtaaccattctttttatattttcaaaatagctttaaaatatgctgttggcttttatgtttatcagagccataaataaattttgaaaattaaattaatgaattatttgtttattttccccttacagaaagaaaatgtgttacacaaaaaagtgaaaatccagtggtggcagattcatgcctgtaatcccagcactttgggaggccaaggtgggcagatcacttgaggccaggagtgtgagaccaacttggccaacatggtgaagccctgtctctactaaaaatacaaatattagccaggtatggtggcttatgcctataatcccagcactttgggaagccaaggcaaggtggatcacttgaggccaggagtttgatcgagaccagcttggccaacatggtgaaaccccatctctactaaaaatataaaaattagccaggcgtggtggcttgcacctgtagtcccagctactcaggaggctgaggcgtgagaatcacttgaacccgggagttggaggttgcagtgaactgagatcgtgccactgcactgcagcctgggtgacagccagactgtgtctcggaaaaaaaaaaaaaaaatagtgatgctgtttctctaatgtgacaatgaaatagaatatttgtgaaatttttaaaatcaatacaaagataaccaggcaactattttttattttagtccttcatgctgaataatccttctaacaatgtgtgtcctttttcctgccatggtaaatacagtagactgaacatattttgtattactctgttctgagagtattgtttattctcttggaatcatcagttattatttagcaatagtacaagtgtaaaataaaagtaggttaagttggatgcctaatggtcacataacttaatttgaatactttcagtttttgcttaataactaatatttagatattgtacatcctaaaaatgaggttgctagataccttttccacagtatattcatataagaattatcttgattttggtccaagttatttacaatttgctggggaaactctgcttttttctcattagaaagcatcctttatatgtattagaaatttaacttagaatttaattaacttttctatattcactctacagctacttttcttaaaagctatctttcttaattttgaggtaagaaaatctctttgaaatttttgatccaagaataaaattatctggattattttactttttgtggtagccaaacaaaagagaagttgttttcaaacaaattccatcagtggtatatggtcaatataatcagtagaccaatataacatttagctgttagtgtcttcttaagaattgtttagtcattgatctatatctatgatacattccctttatgttttgcaaatagaagagaaaatgaaatagataaaaacaatgcctgatggttattgagtgctcatgtgtgtgttgtattttaagtactgatatttataccacttaatctttacaacctctagtgacactattgtggtccccatgttacccaggaggaaactgaagcaccaagaggtcagatcgcttgtccaaggttagagtgaggatatgagtccaggaagcttatgcacttggacgacatggccgcccagccttttgcactgcgcttgcttttatttccccaattctcttatttctttcctaacagaaccctcccctctgcttcctgaatcagtttagaggctaaaatagcagatgaagctaaaaagtttctttgacatataacaatttcctccagaattatcttgttgaaagtaaatagcccatctggtttcctcttttcacagaccagaactcctaagtgagctttgtgactgaagctggctgagttccatgcagtgcgcctgttggccctaagcaagacgagcacaatctgtttcttctatttctaatagaggaaaagagttccttcatttgcctctttaattcattgcttgaattttatgtccttctttctcacaatggcagctttcctgctgtggtcttttttttttttttttttaaccttcaggtaaatttgaaactacataataaatgcttttcagtacaaggacaccacaatgaaataacattaaaagttgcattttaaaaccatagcaagagattgtgagctgtgtgactcccgttgattagcaggggctggcggaggtgtctgagaaagccgtgtttctgctgccctattctctacctgctctctgaataaatagaagtgtttagtgctttgctccagaatccacgggagtcaaacagccaagctctgcacaccctgagagtttacctctaagtaccttaatttagctcctgagtttacttataggaaacagcaggaactatccctctagccctgataattaccttcctacagggctgactgagggttacagaataggggcttaaaaattgaacctgaattctccctggccaagaaaatcatttgattctttctgtcttgcagagcagataagaatcttgtaaactttatgagctattaaatgcattattttaatttctagttttcttgtggaaccaggtttcaagaggtcttcatgcagtgtttgatgtctttccatgactgatggctgtcctccaaatctcattatttttaggaagagctcaaaaaagccagttccttgactggtatcgtttgcttaatgggacatctagattttacacttaagaacttgtattctcacagaagctctaccagattcctcttgattaagggcatattgatggaaagagtaggatttcaggcccggagtatttggcctggccctgaggtctcacatttacatctatggcattgtgagtgtaaatgatgtggtggtatagctgcttctaaaacagtgttcttctgaaacagtaaaggggattttcaagggtatcactttaaggggtgaggaggggagaggcagtctaagaaagggtctgacccctcaaacaaccaatttgtgtctgtctgacacatcaggcaggtgtgaagggtttccatcatagatattggaaagttggaagagccagtttttagtagttattactaaagtctcttactattttaacattttttatttctgagctaaggatagcaattttttttaaaaaagcaaaggaacattacctacgaagtaatatataaaatacatgtttaccattgaagctacacttcttatatttttaaaatataaatctctacacacttggtaaatgcagcaaaattatttgacttagtttaaaactgattaagaaaaatactgtttttcttgtagatttttataatataaacaaaatccgaagtccatttgtttcacgattcagatgtgaccatcctcgggcacacctgctgtgtgttagagcccaccggacccatctagctacaataactcattcagtattccttaagaagtagttttcatcatccctaattcttagacgagtcaatgaagacttggttttttaatttagaacacatttttattcacaaatatttataaattgtaacattaactaaaatttcttagctgattgtccctgggaagtcacatttaaggtgcatgtttgcaactcaaatgcatttctgctaaagacattttaaggcatcagtgaaatattccaatgagctttgacacatagtttaagtacacctaatagaacagactgaggcattcatgtatctaattattttttaaagaaacccaagatagaacagtgaagccaggaatttgattggtgatgacctggtttcatccctggtgctcaatcttctaaggagtctgggggagaggtgacagggttagtacctggggaggagtgccagcacagaggctttggcttcctaaaggaaggttaaggcagacgttcccatagagtgccacactcccaggctgcacattctgcctacaacccccccgcagtccacctgagcctggtggtatagtcccctgctgcccaggtggagggcatggccagctccagctattgtgttagtgctgggagctcaggctgccattgtcctcacactttaccctcactctttcactgaggctcagcgggtaccaggtcaagaatgtttgtctaagtgtccaaattgtgcatctcctgcacctgtgtctcttagctaaggcgcttaattacaaagcaaatccccctccctgcaaatgctgtctgtggtctccacgtgagaagggcctcatctctgtcatgcgcttgtagtctcagcacctgggaaagtactagcatttagttgactcccaaatatattgaactgataaaggaataacaacacaatctaacaccttcactgatagctaaaacagtggtaatccggtaaagataatctacatggaaatatatttgccaaccagtgtgtgtgtggactatgcattccagttgtcttagtgcataatcaggctctactcacgaccctctgtgactgtgggacaggaacctccctgtgcacagccttcctcatctacaaaatggggatagtatgatctacttcttaggaatctccagaattaaatagaaagttcttagccccgtgcctgacacacactcaagctaggcagctggtatacgtgaaagacatggaaaaatgaagagtaagttggagccggcttgtgttacatttcaactgcacagctctactgctgagaccgtgttcagttttctcaattccaggtgtttagaaatatcaatctgttttggttttacccacaggatttaaaatagaatggaacagtatcacatgttaattgacaagaattagaaagagaatgtatataaatattaaaagttcaacatggtatggtaatattttatacatattttacatgtattaaaagttttcgttaaaatggagatttacgtcattgtattgtagttgtcttcattacagtctttaaatataaatgtcagaaatgaactctctgtactactttttaaatccaatagcttaattttcacttttatgtagtgtggagtccaatactaaagtaagttttttttgttgccactctattaaaaggttaaatgttccttagtggactcatacaatgtaaaataagattttcctagtaatcaacacctagaatactatcaaagcttatggtaaagtcttaagtaaatatattccaaatattaagtaaaaattgattcatttaattttttgcctaaataactttaaaaactggctttcggtattcctttatggttaaatcaatccccttagatatcaatcaaccatgtacatgcagtggagcctttctctgacactgattcattaggagagctcatttaaggagttaaacatctctcacttgtcaacactgaggtaattatgcactattaattctcttgtcatttcaaaaagtgctattttaaaactattcatttcatcaatcctgagaagtaggataaggtagacagcctgctgtaaaccaatttaagatgtgattacattgctttattcctgcaatgcacgaatcagaaagttgatttaatgtgaatacagcttttgaaatgtttcttacttcattttaggagatgaatatgattaggcaaccttgagaggacaaaggagttgatgtagaagaaaggaactttaatttattctgctgtttgcagaatcaagatagtaggtagggagggctgagggagaaaatcaggaaatggtagttttctttgtccgttttgtttaatggaagcttttgtgtgtatctgctatctgcatattattagctgttaattagagtttaaacttctttacagtgaccatctatgaaggaagtagaatatgaatttttttgaaaataagaggaattacattgcttaactacttaaaattatttttaaaggaaaaacgtcaagtaaaccagagactcaatatatcatgatagatatctgaaaacattgatttcaacatcctgccaagtttgcaatacttgaagttcattaatatgcagattttaaataaatgttaatgtataaaatgttggttaagttatttctcctaatttaatcttgtagaacaattgtcacgatagttttcacctcctattttaaagacatatcaatttaaaggagatgtttagttctacaaaaacaatatactattgttttttgtattttgatttaatttgatttttaaaacccttggtttaatagaagatacagggaaacattttattcataaatgaaactattccctatatgctttcatgagcttctgttggtttcattttgtcgggggggtgtgtgtgtgtgtgtgtgtgtatgtatgtatgtgagtgtgtgtgtgtgtgtgtatgtatgtgaatgtgtgtgtgtgttcctattggaaatgagtttttgaagttatacttttgctaatactgaaagattagtgatgatgacataattgacatgttgaatgttgagtctagttgtacactgatgtcaaaaaaaaaagagagtgaagaaagctccaatcttggaagcttgttgacccttagctttacaggttgtcttactacattgtctcaagccctaggtattttgattggtgaacaggtgtgctggacttgtatttttttaatcacatttaaaatgattaatagttcatgtaaattactgttgttatagggttaattccagtgctgacccatgagccaattttttttttttgcaatgcatctcaaattttaaaaactactttttaactattgaaacatcttacttgtgattctaccacggttctgataaaagttcatttccattttaatagtggaattgattatcttaattaatttaattttaattcttatcttcttgtgcaatagttatttaaggtcttttacagaagtccctcgttacattatctcttttaagcattgctttttagtccgaagcaacagctgcttttttgttgttgttcattacaattataatcacattgaattttggttttcttagcagttggcagtagacaaaaatcacatttcataaatttgactttgactggtatatctgaatagacattagtcctcagattttaatggtcagcaccactgattcctttattcagcaagtttttgttgatctcagagggagtccagagccgagcctttacaaacaaaaccaattttagacacagattctgctttataaaagtttatgttttatctggggaggcaagacatgtatgtaaattaattaatagcaaagtatgtcatgaggtaaaggaaaacctaatgcagattgaaatgattgcttatgtaccaaaaggacaggccttgaattggatcttgaaggatgtatagtatttttaatactataaaagtgcttttatagtgcttttttaagttgagagaaatagaaaataggagtaaaagatgtgcgatagatataagcatatgatgttgaggatagttaggaaatgggtcaatttgaagtagagattcataagcttatcagatttggcattcaaaaagaacaagcagaaacaagaaagaaagatgttaacacttaatacctattattggttaggtgttttaactgaatcatgtcactgaattctcaaaatgtattcctgtagtttgatattgtgatcccaattttgcagtcttgggagctagatctcatagtcttgctgaaggccaactaagaagtgggtggagttgagatgtgaatgttgaagtgtttgtgttatcaaagccttcgctacttcacctgtatcatactataaacagtgggcacaagagggattgtcttgctgttcacacaaattgagcatgctcggaacatagctcctcatctcttttcttctcagatcattttcttcctactcatatttattaatggtatggggacaaagcttcttttctaccctctgaaagtttgctgaaaatgaactgacaataagcagattaatgggagaagaagacttacaaatttgtttaacatgcctaagcatggggcaattgcaggagaatgattacccaataacccaacgaggtccagatgcttgtatacccttcttcatagggaaaggagagaggagggaaatgaggcaattttgtggggtgtactaaatgattttaatgaacatggaagatagaagttagctcgtcaatgattatttgtgtgaagtgcttgaatattcattcaatattcattttgggatgaagttcatcagggttctaggtgtggtgtttaattttcagtctcttcctctaggatatgagttttaattttctcttgttaatgaaattcactgaagagatcaaaggtaacgtacttctctttggtgggtctggtttctaggtagacaagagaacttcagagaacagcctcatcctctggtttgggagagacagatgattgagagaccgggagaggaaggtcacagagaccctagggctcctgctttggttcagtatgccaaagcaccatattttggggtattgtcttcagagtcccaagaagggcttcaccattctttcagtcattgagacttaaaatattggagacacttttattcttaaaattagcttttgtttaatatatgatgtttgaatgaaaaatttaaaaagaacctggcaaacaatgggtcatagattaaaacccatattcttgattatatctcacatagtaagcttaagctcttttgatttccagtgaactgtatatgcttttcatgtttcacagcttaccagatgttatctattcagagcttcagcatatctaggaggagtggattcagttaatctagtcttagccttgtatattttgtcataatttggtagatgtttttggcttgccttttccccatatttcagcatttgattatatattgatttggattaattttttcttgttagtctttttttcttttcaataagattatagaaaggcaagagtgatttcatattcttcaatagcttccccacactttgctcatcaccataaggttaggcaccaaatagtcaatatgtatctgcttaattactttacctgaaatgatctaaagcatattgacatgtaagacacccatagacttgtttctgtttctgtagctatataaagccagtaccagctatcacctaatccatgagtcacacatggcagtaatttaacaatattttttaaatgattaacaaaacccttttaatggaaatgaagagctcttcagaaaatgttgaaggactgttgtttctgtgaactctattgttgggtctggctttttgagtatcactctctgatcaagaagccatttattaatagtctagatgttagaagttctttggggctcagtagtgaaatttaaataattttgtttctaaaaactaagggacttaggctctactggaatgcatgtccctccaaaataaaaacctggacatatcacaaaaacaactacttgaaggtactggattgtgaagagaagcagagatgctggttgggtgtgcatactggcatggaggagaaaaggtggagagctgtagaagtcagttcttatctctgcagcttttagcctggggccaactgcagcacctgtggtccacacacctggggagaaacttgcagtctctccagccagggaaagaggaaaatgaagccttttgactttgcaagccaccatccttggggtcctcatgctcatgtgatggtgcttgagctctagccagcacatagaggtatagggaggaagacaaagaggaagaaaagggtaaaaggaaaaagtagcaaaccagcctgactgtccccttataaaggattttcaatccacctagtgactcccacctaaatttcattaacaaggactgtgtcatgtggtcagtcctggctgtgaaagaagttgggaagtgtagtggttaaaatctaggcacattgccaccctcagtaatgccaaggttctgttagcaaggaggaaaggaaaagcaatattgatagactaggcaaccagcaggatctgccagtggacacgtatgcctttgtatgctgatcctcttccagaacctgctgtcacatctgctgagatcttcaggcaggaggagatccatcctttgtacattagcataggcttttagttaacatatgtaggagtaaatatgttaagtccccaaggagtctcctctaattgctgtttgtaagggaaacaggcaaggcagcttagtgtggtgtatattctgtcatttctgtattctccatacctcctgaggtctagataggacttcacttcttcaactcagtactccttattcattgcttatccaattgaatatgttaagaagtagacctaggaatatttactttttttactaatgaagtagacctaggtatatttacttttaataaatactcctgctctaaaaaatggtattttcaaattattgataatgtaaaaatggttagatatgcaaaaattgtttccataaatgtatttaatagttttaaaatttctcagttaagtcttaattgaccttcaataaaatcctaaactattgtttgaacagatgcttcccaacttttgacgccatagcatatatagaaggcaggcactgagtctgttagcctataatctccaaaaaaggcagcacctggtttgttttatgcctatatctggtggaacctgacataaacacattaatacaggattttaaaaattaattattcaactcatattttgatgctgttaaaacttgctttttttactaaagtaaattaactttctactctcagttactttgtgtttattgaggctacagggctaggaaggtctgagtttcagcatttttttgacctaaaatgtcatttaaaaaaatctcaaacctgtgagttatatttattgctatctttttattttcattgatgtatgtctgtataattttttattacggaaaacttaaaacatttttcttactgaaaacttgaaggttatacagaagcagggagaataacttaatgaactctgttataccagtcatccaactttaacaattttacttatatgtgacctttttcatctatatcctcaattacccactctcttatccctcagcaactagattatttggaagcaaatatttggagtctgaattgaataaactgtaaagaaaattatgagacagtggaatatatttgagtattaatttgctattaaggaagcattgttaatatttatagatatgttaattatattgtagtatgcttaaaaataactttacttttttggagatacatgctgatgtatttatggatgagtaatgtaacctcagggatttgttaacaatttgttttttaaaagttcttcctggctaagtgcggtagctcatacctctagtcccaacaccttgggaggccgaggtagatggatccctcgagcccaagagttcaagaccagcttatgcaacatggcaagaccccatctctacaaaagatttaaaaaaattagctgggcatggtggcacacacctgtagtccctgctgcttgggaggatggcttgagcctgggagtgcagtgagccaagattgcaccactgcactccagcctgggtgacagagtaagaccctatctcaaaaaaaagaaaaaaaaaaaaaagtttttcctgacacaaatcatttgaacaaacaatgtagtgaatccagtatcgaatccagtatctaatttcctcacaaacaaatacatgcttttccagtagactttctgtctctagtccttgaagccaagtcaaggggacaggaacacacctacctcctctaaacagaagttttaagagaaaacccacaagcaaagaaggactggaattccttcccttcctcctttcttgagcgtggcactttctcaggcagggggaagcacatcattcttaggatttcgaattgaacatcctggtctcaaaaacggattttagtgatatagcattctaattatattttcctagttgttttcttttatgatacttagaaatcattgctaccgggacattttttgcctttttaatgattttcatttttgccctgtattcactgtttttctctctcttttttagtatgtttcctgttaccaatttgtttataggattccaagaaaataccatttgctgagtaccatgttccaggcactttctgtagtcagagctcgtttacttttcagagcagctgtacattgtgtgcgttcccattgtacaagcagtgaatcttcggctcagagaagtgaaaactgccccaagatcagtagttaataggaggttagccaatatttggactctagcttctcggactccaaactctatgtacttaagagttctaccatattttactattgatactttttattttcccaaatatgatttcaatattctttaagttatatacttgtaacttacattttccaaccaaggcccaattatttttgctcagatttggaaattatttcttaaattacaaaagactattgcagaggctccctgaacttgtacattcttctacttaagtgtacatacagtatgggtagatagtcaagaaatatccatttccaaaggtcagaaatagtgttgaacagtaaagtataaagagttttttaaaaatgaatgatggaaaatgatagaaattgatagaaaaattagaaaaatataccatgtaagtaaagatatataatgtttttgcaggtctcattttacagagaaagtcatgtcttgacattttttaatggggctataaatttagtaatattttagtaggaataataggatattaaatatgagccttcattcctgaaattttagattttcttaatgatacttacccttcctgtgagcaaccaaccttgagagtgtatttaactgagattttgaagtaatgcatgatacatcttgaatttctgtgacccagaaatattgatgtgctaattttctgagttaaaaactttctttttatgtttttgtccttgttaaatgggcaagtgctggctaaatgtcttggagaatacagtattttcaggaaatgacatgaagtattgatttactttattcttattgcctcaagcagaacagccataaaatatgttcaatttctcctcatttctatctgcagatcacactgacttgtgctgcagatgacaggtgtggacatgataggagcatattgacatttactgggatttgacttcaaagctttagagatgaaaagcatactgacaaagtcgactagaacttgattcacataattattgtggtgctaagttttgttcagcagcacagtataaacacgaatgtagatccgacacagaacatccaggcaaggacaatgcctactgtgctaaagcttttacgatttaaaaatgtcagcatgaaacctgctttggaattattttggaaaactctaactgttgaatatgtgatccagatgaataactttaaaaaatgtatcctttcatgaaatcacattcaaattgagttaaacagttctttatcagttactgattctttcttaagtatgaaagattaaaatttaatttgagttttatacaattttcaagtatgttaattgttgtcaggttagtcacaggtgactgaattcttccaggattgtgatgtctctttgggagtgacacagtttaattttgaataaccttaagagagtcactatggttcaaggtatgtctgctcatttgcctctaggagcacctgtgcaaatggacagatttcctaagagctgccataaagacacatactgtgtgtgctactcctcatatttagctctgcttctgaaggcctcgcattctgctggattgccacagttatcactgctatctctgccatgtagaatgagagaagcaatagaggttaagctactgattgctgctattgacagaaatgtctaccagcactccatatttcttctttttttttttttttttttttgtctcactgttgcccaggctggagtgcagtggcacgatctcggctcactgcaagctccgcctcccagattcacaccattctcctgcctcagcctcccgaatagctgggactacaggtgcccgccaccatgcctggctaattttttgtatttttagtagatacggggtttcaccgtgttagccaggatgatctcgatctcctgacctcatgatctgcccgcctcggcctcccaaagtgttgggattacaggcatgagccaccgtgcctgacctcttcaacattttaagtaccaaattcctccagcatttattcctagagctgcacaaggtcaataggcacagagatatttatagtatgctttgtaacatatgtgtatcatgttaaatatgcatgtgcaggttgaattagcttcacttattcctgtttatctcctgtttgaatgattattttagtcactatgtacctcttcaagtgactctttaaaagaggcttcaattgaacttttattatgcacaaaaattgtctgagattcaagatggataatttgaatattttgaaggatctttgtgcccataacccaagtttcttgaaagcaaaaaaaggtagctattggtgtctcataaagaatgaaatttaatggctggataattctccttttccagtttgagttcctttaatgcatttagagagggggccatcagagatggtgattgtattcaatgctgtccccgccctcacatctgttagggacaactcttaagtacagcttgctcactgctcactgtcagcccaaaaccatgtgaagaggaaaacctgagaaaaacctttcctttattgccaaaagcagagctgacaacatgcttctttgattcttacacctttataatgaatgtttgggtaggtcacgatcccatctctactgaggatgcagcattagtggccaatgttgtgaggtgatagatgggacaagataggttagaaaggcaggatggctacttcaggcacgaccctgctgggcacatacatcttatacagttgaatttgtgaggcaccttcatctcttacctagaggatagtcattggcaacaagtttgaaaatagtccagtttgcagttggtcagtctcttttatttaatgtttattactgtaattggcctaaatatcaaaagttgctttttacattctacagcaaattatatgggcttattttttctgtgcatttatttctgctgaaatctggaggctgatttaacttaaggggttcgatagatattaggtgtctgaacagagactggtcatgaccaaggagtcagataataaggctggttgaatcctagataccaatgggaagaatctagtttgtctctcgggttcagtgatttgctgaaaggactcatagaaatcataaaatctattataaaaagctattatacacacagttatggcttaatatagcaaaatgatacagattcaaatcaacaaaggtaaaagggacatagaacagagtcagggagagaccaggaatgagtttctggttgtcctgtcctggtggatttgtgtggacagttcctaattctcccagcaatgatgtgtgatagcacacatggagtattgtcaacccggagggtcactgagccttggtggtcaaggattttgttggggggggtctgtcttgtaggtgtggaacacctacgtgggtaactttagttactcagtctgcagcccctcctgtagtcaaacttctgatacagtgtgacctagggccctgggtgaactagaacgggtgtttgccataaatcacattgttagcataaaactgtctagtgtggcccaaggccccaggtagaaaagcaaactcttactaggcaggatactccaagcacttagaggttatatcccaggagcttgtcaagagccaatcttttcttttctttagaatgtgtgtggtttgaaaacctcaagactgctaagttaaccctttactgcacaagtctcttgatacacagggaaatgaaatcccagttcaactgtctggacaaccatgattttttttttttttaattttctaatcttttttttttattatactttaagttttagggtacatgtgcacattgtgcaggcataggcatgggcaaggacttcatgtccaaaacaccaaaagcaatggcaacaaaagacaaaattgacaaatgggatctaattaaactaaagagcttctgcacaacaaaagatttttttttttaatctgtgcatatggacacatggcctttttgaaaattttactacctatttacatgaaagcctgataaaagcaagatctaacaagagtaacattgaaatagcccaacgtatttgcgtgacagatttaccccaggctgctactgctgcttcagtaagagagagatgtcttcctttccctttctaaccaatgaatcatgttgactctagtgatgtaggttgaatttatttctcactggttatttgatggaacttttttctaagtatttgtttatgaaagtattagaatcgtgcatgagtatgagaagtatgtcattaactggaaaacaatatatttcaccgaaagttaattttttcaaagcaagaattctcagagcctttcataaaataaactacattttgatcctttaagggttattcaaacttcttgagatgtagaaccttttttttctttggatatccaatgagataattggtgggacacagaatgggaggtacatataaatattgactattattattttgaaatcttgatggtaagtgggggtgtttttggaatatattcttgaaattatgcaaaaagttggcattttctgacactaatccattatgtagcatgttatgtagctgtctctactatgagatggtgtaatgtatttttaactaattaaaacaaattagttgaaatattttgttctaaaacattttatgttttaagtgtgcataaattgaaaaaatgtgtttacttttataattatctaattgaaatgcttttgctttacatttccaactatatatttagatatagtaggggcatttgttgaaagaaatttttatgtatttatgaaaaaaattccttatcatcatcggatgcttatcagatatgatgaataaataatatgttaactttaattctggtgaaattctattttgaaaaagatgaatgggaaacacctcagataaaaaattgcaacattactagtaaagattccattttttaggacagcatatccttcataaccaaaggtatttactgtagcatgaaggcataacattcagtgccaagagtgaggtcactgtaattatagaatctgtagcatttaaaatttgaaattatcagtaaagaaaaacccaagggtttttcaaagatcctttaatttctatatttattctgtcttagggcattccattagtaaaagaaaaaaagaggaacatctgatctgacctagttagtatcttaaaggaagcaaagactctgaagatgtccatttctagtacgagaggaaaatggcatgttgttatagaatcatcttttcctctttttgacctcttaactctttctcagcctagtgatatttattatctactgttatcaggaactgtactcattgtctccaagccttttgtttcttggtccctgaaactcctctgctttgtagctaaggtaggaggtatagtatatgtagtgattttggtggtgagtttctatttattttatatcagtcttgctaatgagtgaaagctaccgctttcccttgatgcattcatgtggagtaaatgagctgtgctcttaactaagaggaagcgagcagtaaacaaggaaacagagactctgaaagcaggttgcttgagtttgaacagcagcctcattagctgtgtttttgtgggcagattgctttctcattctgtgcctgcttggtttctccatagaatcggtgtgagaatttcaagtctgtttatgcatgcagagtgcttagaatagtacttggcacctagtaagtgctcagtaaattttatgttactgtttttagctaaagcgaggttactcgttactgatattcagaaatcagaggcttaatttgtattcgagtacattctaaataatggagtacattctaaataatggagtacattctaataacaatatatcttcaagaaaataaatcaatgctcttatttaacccacatgaatatcttttatttagaggacataatacatcctattctgagtcctcatatattcagaataaagacttctgatttatgctatgggtctgaaattggtcaccccacataggcatgtttggcctagcagtatttggttttggtttttggtttgtttttgaagtttctttaagcagggcatgcagtcacaggctgcagactctgcctcgctctactgttttacactcttgcgtgattcatgcctttaggcttctgagcctgttgcccctgttatttaaattttttggaatacctgtgttaaatttcacccagagggtctacgtgtattgaggaggaccataaaggatggtgttccttttcctggagacttgttttcaatcattaagacattaggatgcttcatgtatttccttgataaataaatactgttggaacccaaaagtagacatcattttcctgccaaaaagattagtttggagaaactaattcaataaagacaacataatcgtacccagtagtataacctgtgttaacacacaaaagagttaaatgattttcaaggaatttctgtgttaatacaactgatataattctaaagatggctgaatttagcctaacaggcaatagaagcctaggtaaagaatacctagcagttttttttttcctatagtagttggagctctttaacagatcttcagtgttcacaaattcataagaggcttcttcttctttgacttgtgcattgtttatctgcccatcgctgttaacttctttcagtaagaatgatgccctctgagtaatgcccctgttgtgaactaagaaagaccgatgaattattaataacccacagggttgcagagcccttgtaggaatgagagcagtgtgctctgtacgacagttctgttcacctgatcttgacaaattaggagcatctaaaacatactcctgcttgttaatacaagaagtgggggaaaaggtgactttgaaatgcatcaatatttagcccttttttagaatctcagaaggataatagggaacagtgtttcttcataaataactgtctctcctatctttggtttagcatggtaggctaatgcctttctgtcaagctaagctttatggttcaatttctgctgtattccttgagaaacaactggggggaaaaaagtaaaaacacaattataaagatgcctgctccataatcatttagtcctgtttatagaacttgatccttttcaagtatattctcctatgtattaagctgataggcaatgagagagcaaataaaactctttactggagaagcaattgttttatcaatagcctggctcatgtgggattcttgacaggaggattaggagttgtagccacgttgaaatgtaaaatatgtaatgctgtgctacacaaggagatgggttccaaaaccttctgaatgtgtgcactcttggtactcactaaagtaacagttaaattttgttttaggaaagataaagactattgtatatttattatctagtactattgatctgtttttcaattttgttagttatctaatacaattgacctatttttaaatttttattgcagtatatcacacaaatattgaactgtacaaatcttacatgtagaggttaaataatattccatatgtatacacccatgttctcaccatctagatgaatatgtagaatatttctaagtcatgaagactccctcaggcaccctcccatcaatatcctcactgaaagtcaccaccatctgacatctatcactgtagattatttttgtctgttcttgaacgttatatagatggaatcatgcattatgttttatgtctgtttttttcagtcagtgttatgtctatgagatttatccatatataaagcagtaccatttgtaattgagacatttaccttatgacttgatttcaaattcaggctgcttatttaagtaaaatatttccccattgtgagcagaataattctaaaaagtaccctgatattcaggtatgtatgtgcttcaacaattgtcagaatcattaccataattttttttactccacatccagcaacaggatcctcaaaatgttcctttttttattctaagagcaatgagttctccattgtgtaaattaagatcttaatattcatagttacttgttgctggagtttgtaaattgccagtcttgccttcatgctgagaatcaaattgcatttgtgggctggcaacacccttgttaagccatcctcatggtatgataattagagattcctgctaggtttggcttgtataaaaaagtaacacaggtgggaaaatttacatacacatcttcaataacaaattgttataatttttcagaaggggaatttttgtatttcatgtagattgctcataagcaacagtgtgattgcttttctctcatttttagatatatagcctctgcagtaaggggaccatgttaagaagaagcatggccatttatgagcagtaaattgaatttatctggctttattccattctctatttctccataaaagactcttttgtggccagtcacggtggcttacgacggtaatcccagcactttgggaggccaaggcgggtggatcacgaggtcaggagatcgagaccatcctggctaacatggtgaaaccccgtctccactaaaaatacaaaaattagccgggtgtggtggtgagcacctgtagtcccagctactcgggaggctgaggcaggagaatggcgtgaacccaggaggcagagcttgcagtgagctgagatcgtgcctctgcactctagcctggacgacagagtgaaactctgtctcaaaaaaaaaaaaaaagaaaaagaggctcttttaactctaatcatagatcagaagaattaatattgttaaaacgaccatcctgccgaaagcagtgtacagattcaatgcaattcctatcaaaataccaacatcatttttcacagaattagaaaaaacagtcctaaaattcatatggaaccaaaaaaataaaaaataaaaaagcaaagcctaagcaaaacaaaacaacaacaaccaaaaacaaagctgcaggcatcacatttcctgacttcgaactatactgtaagactacagtaactaaaacaacagggtacttgtataaaaatagatacatagatcaatgaaacagaatagagaacccagaaataaagccatatatctacggagtgccagctgatctttgaaaaagttaacaaaaacatgctctgcgtattctgagatgttctcaggagtatatgttagtccttctccacatacctgttttccaggttggtcttgaactcctgggtgcaagcgatttacccagcttgacttcccaaagtggtaggattacaggcacgagccatcatgcctagctaggctaccttttaaatatatatcatggccaatatttgtttattctgattatttattagttcctttttgatgtctggaagaacttattttctagccagacagactcttatatcaaatatcaaatttccagccttccaaatgggttttcctaccttgtctcaagccaaagcaaaacaaacccccaccccacaaaagaaaaacaaaacaaaacaaaaacttctcctccaaaatcagccgttacaccacccacctctggtgtggacatgacttccttgttcttcctcaggagttatcatttattaaatgtccagtgtttccactgcactggattattctcagaatgttcagccagctgggcaccatagggtcagctggaagaatctgaccctttaagttttcagctgtggctaaatcatgacatttatggtgaagttttacttaaaatatagtttttcatttgattgatcacttcctatattttagagaaaaatcatgtcaccattttgtattatgtttaatattttaaaattaacttttttttatgttgctgtagccaccacatccctaacccagacagtgcttaaaaggcttgaaaggagtcctatctgtttaataatttgtgcgctctcccttcagaatggacgttcgctataaacaggcttgcttaccctctattgcatgcaaagcagaggttcctgtgtttataatattgaatgcacacgttaatgatgggcgaagagagacacacgcagactgaccttcacacttgacatccactgagagggaaaaacagggaaggcaaattatggcaggggagggtctgctggccaaaaatactcagctctgtttgagaaatgttgagtttgattcttggaagttgtccatatatctggatctcaggaaagaacatagctagaaatatagattttggtagtggtgagcatacgaaagataattttagtcactgaatttaacttttagtaagtggatttccttggcttttcttctttctggctaaactgtttaccatttgttacctgcttataccagaggaaaagggaattgatttttcactttttaatgtcggtggtaaaggtgtagaggaatacttctggttttcatctatcttaatttttcccctttgtactacgacattttccaggaattggagtgcttttcatatttctaatgtgaaattaatagttatatatatatatttacttttgtatgaaaaatatatacttttctgaatattgaagaagtagcacagttctactcaatggttaaatttattaaaactagaagttttaaaacacagtatatctctagtcaaaaatgtactcaggagagtcttcatgaccagctgtgctgtaaagatgactgcaaacgtacattgatttattgcagtacacatctgtgcaacatgcttcgtggcataatttagtcatcacagcagcactatgaagtaggtttcatcatcaacatcttaaagattagagcattaatactcagaggtgtaaagtaatttgcccaaggtctatagctggtaagcagtgtgactggtttgtacatggttaggaacatgtccagtcctgctgcagacttaatacagtagatgcaatatatataaattacaaattttcttttttacaccgtaaacatgtttatgaaaaacactaggcttaaattatacttttaagttacattttaaaggtccgatgaagttctatttaacaacaccttttagttaaatgaatacttattcccttatttgtatattttacagatctgtttggtcatattattaaatatatttaaagggaggctggcctgctgggatttgttttttaatcataatcattttttctggttttgttttgaataatttacctcactaacagtgaacagatttaaaataagtaacctgctccttgtgtcctaacttgtaccatgaagacaacagtaaccccatgtattatgcattctcagtgtctctattttgtagataaggaaacagaagtttcgagaatcagcaacattgacaatcagcctaaaacttctgactccaaatactcagcttgttttcctgagtttcccaccctctctaaatggatacattgtaaaggttgtcattcaacttatgctgtattagggttttccactgatattaattgctgtggtgataaaattcccacctctaagtaacatttaataatcttaaaaactagacataatttttgaactgtatggaaagctatggggcattgaaacacttttaagtgcaacttacatcttaatagttacactttctgctgccttgattttcctggctgaagagttcagttttaaatctcaagggtagaaaacactggaaaaaaaaaatcagaggatcttggcatacttcaacaaagataaacagctttttgtagtgttcacattatgtcagtaaaatccagcctgcatgtttgaaatgaagacagcctattaatttaaaatggattggaacatcttcgtacaatgatgagggtaaatcaagaaaattaaataaacattctaatgggaaatgtattatatgtaatggaataccaactgcacaaaatactctagtagataagcccttcattaataatggcttggtgaattgcattcttatttcttcatactattctactttctcaaataaagaaaggtgtacgttttttcactcttaaacatttatccacctaagtgattttggtactgcttttgaagagctagtttttcaaatgaatttctttcttctttcttgcctttttttcccagaaatttttaaaagaaaaaagttttaaaaagtattatttccaaagttgtctttttgtttcctgtttctgcctcctcaagacaaccgattattataagacaaagacaaatttgtttactctgtaggaaggctgcatgttggaggaattgttccatcttagagtaattatagtttttttacattcataaacttccaacagacgtgatttttgtatgaatttatcagataccaaaataacatccccaggaaactaaccaaaaacctaatgacttatagttactttgctaatgatctgtgagtcacttatttatatagcatagtccatcttgtagaacaggctttcttaatagactaaggttgctggtttagtgtagactaactacagagtcttgcatcttatgaattatcctttccttgtaggttatcttctatgatcccatgccaattatctagaacagctcgttcacagtagaattttctgacgatgaaaatgttctctctgctgtctgatactagtagactatggcaattgacctcttaaaatgtagttagtatgactgaggaactaaagtttgaattttaattactttaaatagccgtctgtggttagtgattactcttttggacagcataggcctagaataagataaagtcctccccgcttcactgttgaagaagcatgaacatatttgtatttcttggctctcttattaaaaatagcagctgttttgcattcataataatgcgtgttcattaaataacatttgcaaaatacaagaaagtaaaaataacaattattgtaatgtcgttgctccaataaaactactgtttgaatttttagtgatactgaatattctcacagtcattttaattctatgaatcatttttaatataagctgtataccttatttgtatagttctgtatctgaaaatttcattttgggattcttctgtttgcaaatgtacccttattacctacataatggtctaccaaattaatagaatctaccatatgttcttttttttcttcttttttaatttttaaaacttttattttaggttcaaggtgtacatgtgccagtttgttacatgggtaaattgcatgttggtttggtgcactcatgattgcctgttgatctgatatacaaataatttcatgacccaggtagtggacatagtacctgataagtagtttttcagtcctgacagtcctcccactctccaccctcaagtaggccccagtacctgttgttcccctctttgtgtctatgtgtattcaatgtttagcttcctcttataagtgaaaacatgtggtatttggttttctgtttttgcactaatttgcttaacataatggcctccagctgcatgcatgttgcttcaaaggacatgatttcattcttttttatggctgcataatattccatagtatgtgccacattttctttatccaggctaccattgatgggcatctaggttgattccatgtctttgctattgtgaagggtgctacgatgaacctatgagtgcctgtgtctttatggtaggacaatttatattcctttgggatatataataataccatatcttcttaaccagttctctgtggttgcatagctgggatgttttcactgctgcaatccaacacagcactactatatgcacttgtatggctgaaattcttccaaatttaggattgtttttgaaaatctctggtagattcagataaataaaatttactgagtcaaagggtatgaacattttaaggctatgtatatgtatatgaatatgtatagtcacattattttctaaaatactgtcacatataaaaatattcattttgttaccagtggcgagtgtccaggttcttggcattttgagcaaagaattggacaaaatgcacaaacaaagaaaggaaagaatgaagcaacaaaagcagagatttattgaaaacaaaattacactccacagggtgggagcgggtgggagttgggtctatttggacccaaatagagaatattcttgggtccaaataccccctagaggtttcccattggccacttggtgttcaccttggaaaacgaccattcagaggctgaaatgaagttacaaaggtcacacacctgtgcaaacatctgattgattgctttatgctttatgcaatcaatcagaggctaaagtttcaaagttgcacttctatgcaaatgaaggcttggcccacaatcattttgattggctgtagacagtaatcaggggctgaagggaaaagttacaaaggtcacactcctatgtaactttaaatttcccatctaccatgcagacaaggtgggggtttgcaaagggagtagtctctggtccttttgttacttaggtgtggaaagttagggttttcctttcaatttagttttaggaagtcagtgtgaaacagctttaggttccctgcctccagactctattctcctgcctcaatttcatcacccaacaccaacttcaggcatccaacacacctttaagttttctttaatttctgtcatatttgatttcatgataaatttttcctgagttgtatctattttaataacttatagagttagaagtcctacaaaagaatttttctttggtacatttctgcattttttgctaataaactatttttcttccacattcttacgatttttcatgaagaaaaggaaacagagtgcatgtgctgttctgtgctgttgagcacagaggagtcttcctggaatctttttcaaaaacacgtgtgaaagtgagaggccaaacgagagattttctatattttgccaactttttgcaataactttgttttatttgtgtcttatgttttaaaatattatctacttgaaagtgaggcttgaatataatggtgccttttccaatattaatcacattgtggctgctgtgaaaacaataataaggacaattcggaaaacagtttatattaaatatctccttttgtgcagtgttaaaaaattattttggacacagtggtcagaaaatgattcactgaagattgctttaaagaaagcctacagatgtaaacctgaatttatgagaaggagtgattatttactctataaaagtgttttcaatagagttattacctaaatagtgagctccactagtgaatttatgttttagtttttaaaaaaaattgatttacaagcctttatgatcttatcttttgcattaagtgagtttattgaaataagcattctactgaaatgccttaggactagaaacagatctggtacctctaaaagataagctacttattgctctctcattactttatcaaggctcatctgtggggttaaaattgcagtgggaattaaattttgtgttttctagctagatttggattctatgacaataatcttgatctcatgacctgtatgtgtgtacatatatatagtatatatgttttttaatttgtttctcaaatattaaatatatatatacacacacatacagtacatataaatatatctgtattttcttcctcaaatattaagtatatatgcttaattaagtatatattaagtatatatgtatctgtatatacacacatacatgtacatagtacatataaacatatatttcttttcttcctcaaatattatttagtatatatatgcttaattaagtatatattaagtgtatatgtatctatacttaataatatttgaggaagaaaagaaaatgtgttatatgtatttaataattttgggaaaacagaaaataacattttaatgaaaggaaataggatcagaaacaaaaagagaaaaaacaagatggcagtgatattttaacattaacattgaataggaaatatacccaaacaatgagcaagggagttacagtaggggaaaatttaaaatgaagatcctcagactgctgaccctaaggctttaacccatgactctgacctcactggcctgttcttcctcataatcttcatttttaaagtttcatgggtcagaggcaaaatagagagggcacccagggagcagaactctcacaccacagtttttccttccttggtattgatactgaagtaaagtattcgcccttttgagaaggggttattatcaacataatatcagggaacatttggcctacattgtctcccagaatagttgagatgctgatgctgcaacttcattaataggtgtggttacttacttctgtcagtaatatgtcagttaagacatatttagaaaaaatgtcctttttcaaacaatagacttaaatgttaaaactataagacttccaaatgacaatcttcatgaccttgaaatagtcaaagatttcttagatataataccaagagcaggattcataaataaaacaatttataaactggatttcatcaacactaagaaattcggctcttcaaaacaccttgctgtgtgcattggctcacacctgtaattctagcattttgggaggccgaggtgggcggatcacttgaggtcaggagtccaagaccagcctggccaatatggtgaaatcccatctctactaaaagtacagaaaaaaattatccaggcacattggagggtgcctgtaatcccagctgctcgggaggctgaggcaggagaatcacttgaacccgggaggtggaggttgcagtgaggcgagattgcaccattgcactccagcctgggcaacagggcgaaactgtctcattcattcataaataaataaataaataaataaataaataaataaaggccaggcacagtggctcacgtctgtaatcccgcactttgggaggccaaggcaggcaggtcacctgaggtcaggagttcaagaccagcctggccaacgtggtgaaaccctgtctctactaaaaatacaaaaatttaactgagcatggtgctgggcacctctaatcccagctactcaggaggctgaggcaggagaattgcttgaatttaggaggcagaggttgcagtgagccaagatcgcaccactgcattctagcctgggtgacggagagagactccatctcaaaaaacaaacgagtaaaaaaccacattgataaaagaatgaaaagacaagtcaggacttggagaaacatatttgcaaattacatatctgataaaaggagttatatttagactatttaaagaactctcaaaactcaataaatactaaaacaacccaataaaacatagacaatagatctgaacagttacttccccaaagatagtatacagatgacaagtaaacacatgcaaagatacccccaacattattagtcattggggaaatgtaagttgaagccacaatgaaatgctattatacacctattagaattctgaaatttgaaagatgccaagtacgggtgaggatacagagtaactggaaatctcatacatgacagatgggaatggaaaatggagaaaccactttgggaaaaagtatggcagtgtcttatatagtgaaatatacagctgccttatgacatagccattctacttttagacatttaccccaaagaaatgaaaacatatgttcatgcaaagactcacatacaagtatccatagcagctttatttgtaatagacaaagactgaaaataactccaataaccatcaacaggtgaatggttatacaaattggtgtatactatacaatggaatactatttaacaataaaagggaattattgatacatgcaacagcatgaaatgattttcaaaatcattgtgtggaaggaaagaaaccagacaaaagaatataaactgtgtgatttgacttgtataaattccagaaaatgcaaactaatctgtaattcaaatgggtgagtggagggtgggaggatgtcagggagaggcagaaggaagagattacaaagtgggaggaagaatctactgggggtgatgtactcattatctcgattgttgtaatggttttatgggtatatgtatatgtccaaatatgtcaaattgtacacattaaatatatgtgatttattgtgtgtcagacctcaatagagctttcaaaaaatacgttgtcctttgcctaggtaagcgctttttcaaagaaaatttgcaagctagccaacacctcctgagttgatgcaggtattatacaaacgtgggtcagcttgacaattgcattacatactagcaatcgacagactagctttctagtgtaaatcagtcatatgggtctgagtatattcacctctgacagagttccaggccagtataattgagaacaaaatctgaaattcagaaataaacaacagttggaaaatattttccatttttttccctattaaatatgataatttcaggtgcaaagagtgttttttttttttttttttttttctccacagtgcttttcacggtggggactaatggatatagagggtgggaggccagaataaccaagtacctggaagtgaatctttgtggagataatgaaataattttattcgaaaggtgcaaaaggaagtcttccatcactagctcagctgttatggtccttgaactgcccttgcccgtctgtctttttattaatcctttttacctgtcgtcattggctgagccaggctttcttttggtgatgctgcttaccttgatgccttcatgtggctgctactcattctgctttatctcctatgccctgtgatcagaatttggggttgtctttaagttctccagtgttttttttccagcatttcctaccacatgcattgattcttaggtcattttttttttttttttttttgattgagatgttgtctcctctcttggccaggctggagtgcagttgcaccgtctctgcccactgctacctctgcctcccgggttcaagcgattcttctgcctcagcctcccaagtagctgggattacaggcacccaccaccatgcccagctaacttttgtatttttagtagagatggggtttcaccatgttggccaggctgctcacaaactcctggcctcaatgatctacctgccttgcctcccaaagtgctgggatgacaggcgtgagccaccgcgtccagccattcttagataatcttttacaatatgtgtactgtgtgttaggcactgtggagagaaaaataaaaacatatctcagcctcacattctgttgtcagtaactttttaccttagttgaagctcaaaatatttagctaaatctctttctttcttttctctccctctgtttaccacaggtcatgcctccacagtaatggaggaagctatcattcaataccctgtccccatctgccttaattcttgggcacttcttttggcaacttcagaaatctatgttattgacctgcccaaatcctggccagacatttctgctgctgcagtctgatttattatgccatttctctgaactgacaactcagaaatcttaaatttggcaagcccaatctctgacaataaagttttatttttttcacctctgctattttttttttgatatttccaataaattgggtatggaaactcatcaaaacatctgttcttaagagctgtctctagcattgttgtcaagtcatccttcttggcgctttcctttctgaaggcatcatttcattatggttggtggtttcttccatgattccctccagtagtaaacattcactagaatccacaacttccttacttctgactttgtgataactgaacactttcttttgtatttctgttactagtgtcttcctctctaagtatgaaaagcttagacgacctccatcatccttaacacaactcagaagaaaaagctttctcatcatgttgcttctctaaaagattaaagttatcttttttcttgctgatttgaaattgcaggtttttatgctttgaataattacacatacttttgtctatttctggactttctaacctagtaatctttttgtgtataagtcagtattccattattgaatttttacaatatgttttaatatctgctaggtcagttttgcctttcatattactcttttaaaaatagttattctcagatgctctttccagatgactttagaataatttcattaagcttcccaaaagtatattacagttttttattagaattttattaaatctacagattaattagagaattgatgactacacaaattattcttcccatccagacacatagtatctctctacatttattaaagtgtttctctctatcttttagtgtaggttgtagttgttttaagtcctgcatactggttattttagatatcatactttttagtgatagagtaagtgtcattactttggtttccttctgacttcaaatgctgtccccttgaaattttccctggtgttgtaaatttgcctgtcatctattacacagatgacctctcaatccacgttctgagcttctgtgtcttagttccatctttctgttgaatatcatcacctccttgttttccagagctacctcaaattcaatctatttaaaaatgggctgggtgtggtggtttatgcctgtaatcccggcactttgggaggccgaggcgggggggatcatgaggtcaagagatcgagaccattctggccaacgttgtgaaaccctatctctactaaaaatacaaaaattagccaggcgtgtggtggtgcgtgcctgtaatcccagctactctggaggctgaggcaggagaattcgcttgaacctgggaggcagaggttgcagtgagccaagatcgcgccactgcactccagccgggcaacagagccagactccgtttcataaataaataaataaataaataaataaataaataaaataaagtcttctttctctgccgccccaaaatgtgcttcctctatgttaccatccttaattaattttgtcactgccctagccatataaggtcaaaaccatgaaatcgtttttgactttcctgtgtgctaattcttctgactgtccctcagcaatattgctggcatctgtttccttctttccaactcgactgtcttgtcttgtttccagtctgtattatttattacctagcattagttgttgcctggagtattgatgttttagcctctattctttcttcccactctctaaatccaatctgtcttccatgataatcctagtatctaaaacactgatgtcattatcagcccaaactggctctcctttgcttacttgttaaagtccaaattgcacaacagggccttcaaaaattgaccccaacagaatgttgccattttgttttctgtcacagttccacgagcatcctatcacacagtgttcaaccaccatcagcttctcgtgtcctcccatgcctcagtttccttagttatgttgtccaatctgcctggaatgactttccaataccattattccctacttggttgtactctgactcctctttcatgtcctagttcctacatcacttttaatgtgatattgccccacagccgtacccctcagtaatccatcatttcctcctcttacttcagggaacattgagtacatctctattctatgcatgtcacctgagtcactgttatatgttggtatttctgttcttccatttccatgttaggcttttgaagacattggtggggcttcatccaaccaagttttaaaataaatatttagtctcaataaatattgaatctatgaaataaatgcagcttggaagaactgaatggtatcttttgcatacagtcaaagctgtaatgatgaatataacagatttggcatacattgagctcttaatgtgttctgacaccatgcaactagcactgtgcacggattggctggtgtcaatctcagaaccctatggtgatgctctcataagagctccattctgtatgggaggaaaaggaggcccagaaaaagtcattgatttctccagagtcctacagtgctaacaactggtgaaatcaggctttgactcctgctggcttgatctgaagttttacattttaaacactgccgccttccgccacacttgcagtcctgctgtagcctttcttgacagaaagtttgaacgtatgattgagtgttggcatgagctcaggttcctgattctgttattttccatcttcctctgtatggtttggatgttttggttttttctcttactttgatttacatttaaaaaaaatctaggctgggcgtgttggctcacgcctgtaatcccagcactttaggaggccgaggtgggtggatcgcttgaactcaggagttggagatcagcctgggcaacatggtgaaactctgtctctacaaaaaatacaaaaattagctaggcatgatggtgtgcgcctgtagttccaactacttgggaggctgaagtgggagcacggtgtgagcccaggaagtggaggttgcagtgagccaagatcctgccattgcaagccagaccctgttttaaaaaagaaaactacattttatcatactttgttgtaaactgcttctgttttttttcaaagtgagtgagtgtaagttacaaatccttagttaactttttattttcactccgttaagtacttgttgaccgtgtcctctgtggcaggtgctgttctgggcattgttctgggcaccagctacacaccgtttctgcctcgaagcacctcatgtgggcttcagggcaggcactatcattcagtgtttacagattaatttgcaaatattctgggaactctttttcaaaattaggaaaataggagaaataaatggatgggcagtgactatatttaatatgtataaaaatgaaaaagtatgaatatgtttataacttacatattgaatgctttgctcttggctattaaacttgtttcccattttcatctttccagcaatatttcattgaacattcctgttgctagaccactgtccacatccacaatcttttctgtaagatatattcttataagtgtagttactgtgttaccttgacatagtcatttcaagacatttgatatgtattgacagtgataagtaaaatatttatatctctgctgtagattgttttaaaatcagaaagaggcctgtaacaaatattagagtagacctctggcagataagttttcacatgattattcatgtgtgtctgtatatctatacacatgcatacacacacacacacacacacacacacacacacacttttcccccaaaactttctataatgaatgcataaaataaagagaaaagaattttggtttactacagaatttacaaactttctaaaatttgaaaaaacataaatgagtatttgtttttaaatataatatttaatcagttttaatgattaaccttagatgcctcatagttttatagaagatagagtatatcaacttcattgtatcttctttaaagtacaaaagttaaacatgatttttcaaaattcccaatcctagtgttcatttattttttttgccaaagtggttaatgttaccgaataaaaatgagggattcagagatttgttttctcccttagcttaatgatattaattttatcagaaaactgtaagttttgagtgaagttttttcacaatggtatgttttttgttatttaaatgaaatttccaggaagcacctttttggttcaaaaaattgttatatttttaagtcatatttttctgaccaataagacaacatctttagtgtattttttgtttttttgagctaggagtgagccaaaaaacaataggagtgatgttgccaagttaaaatggttaattctatattatctggagtctctaccacattaagttcaagtccttctgcctgatttctggagcttccagtgtctggccccactctctgtcttcactttacttcatgggcaccactgctctgccaggcccatcctccccgcagcacctcccagcactcacagtctgcagccctggtgtctgcctccgtcacctgtcttcctccctgtccctcatccaacctacctcccctctctcctcctctcagcacctgcctgatttccatttattctttgactgtacaatttgacatctgattatttttaatattttaatatttttgtttttatatttaatattttattttatttaatagttttatattcaatattttaatatttcctaaacatgtatgtatatttttcgtatttcctactagtgagaagtacacagcagatattcagtaaatacttctggtatgattgactggtaaattcttctatgatttcggaatttttgattactgcacaaatgtttcaaagtacttgctttttctcttaaggagtaatttgtagccctgagggatgatggcttattgtcatcaaaatgactttgactcttttttttttttttttttgagacagagtctcgctctattgccagcctggagtgcagtggcgcaatctcggctcactgcatcctccgccttccgggttcaagccattcttctgcctcagcctcgtgagtagctgggactacaggcgcgcgccaccacacccagctaatttttgtattttcagtagagacgaggtttcaccatgttggccaggatggtctcgatctcctgaccttgtgatccacccgcctcggcctcccaaagtgctgggattacaggcatgagccaccacgcctggcctgactcttctttagtatgcctataagtaatttttcatcaataagcagtatagtgaaaagaatgttagacgggattgtagtcctgcttcttccattaactggttttctggtgttacatatagagcttgatttccttttttctctaaatagataagattatacttggttattcctagtattccttctgttgcttcaaaatgccattttatatattccagagtgtatataatgtcttcaacaatcgaatggtattgatatcacctacttggttaaacattatcaaagtagaactttaattcttaagtcgtagtttgcttatggattaatacttttatcagacagtataaaaattgcctacctatagattttagctgcaaaatattatggttcaaccaattgcttcagtgatctgatgattttcttaaattctataggaaaaaattgtaaatatggtatatttaatcttacatttttccccttagttttaataatcttggaaaataaatattcttgtttttcttccataaaacccacattgttgaagcaggaagcttaggtggtggcaagtcttctttttaattcaggtcccagcattctttctggctgaggtacaagagcttgacctctttgtgtggctttgctgaagtatttgtcccctacgaaagccaatacaatcagtagcgccagcatagataaagagctgcgtaaggttgtattttagtggcaaggctgttttgtgaccatgttctgcaggcagactggaggtgacagtattatttacttttgttgcttggggtccaaagagagaataaattgctattgatttttgagacattccagtgaagggtctgaatgccttcagaggagctgggtggcaggacagccagtgatggcacagggactgccttttaaaatgaaaattcattttcttgttattgtcataaagatttttttcgttcttagagctagttacaaaaagatgtgactgcagggctgttgctgttataaatgttttctatctccctgaaagaatggaattcagcacttttcacagcagtttgaaattgatagagttctgagtgtgtacttgcatacatgtaatcagttgtactcaaaagggatatttaattctgttagtttattagccactttaccaaggatacttttaggtttgtcaaatgtttagcagcacaaaggaaggaaatttggtttctgttagtttaacttaaaaattgcaaatgtgcttctaaagtgatatatttgctttccttggtgatttattaatttcttgtccaggtgtagtatttaagtggacactttttcaatttggaaaatatttgagacgtttgaattctattgatgccaaatatgccatccctcaatcctataatctcttacaagattggaaatttgtaagagattatggaattccagtccttggaatatttaggattctaactttgtagtgccaactgagggccaaataccagaggaatagctgcaaattagctcatgtcagttattcttaaatcgatagtgcactcctaatttaatagtctaggatgattcatgttctcaagtatctgttttggggaagtatgaattattggcatccagaaagtcactggtatacataaaagtggaaactgtgtatgaggcttgtcatggcatagactggcaaagagattgcaaatggggtaacgttcttgaattaggaagggcttttaaaaatatatatgtaaacgtattcaagtaacaaagggttaaatctgaattccttaattctaaagtttagcttaccatccagatctctaaataaacagtcctctttaaaacatagtggtttttaatgggggcaatcgtgactcaagaagatacaacacttaatgtcttcaactatgttgtgtctgtataatcattttacttctaatttgttgctattaatctattcagatgtgaagagcataagaacatgtttcctttaaaaaaaaaagatgtcctcatgctttttaagtttcacaagtagaagtttcaggcttttaggtcaatgatatggtggcttttctgtggtgaggtatactgggaaatagtagatggtataataaaaaaaactgtggattttagaggtttagagactgatttcaaaactcaatctttcctgttacttattgtgccatttaggcaaattgtttaacctctctaggtcttggtacttcagattctcaaacgggaatcattgtgtctatctcaaaatgggaaggaaaccatgattgtaagtcaagatacatcgttaccaccaccaccagggccaccaccatcatcattatcatccactctcagaatgaagtaaatgcctagaaagcaggtgccattaaatataggaaagaagtacagctgaaaggtctgtccttcctgttcctactttatgtccctgggcctacctattagatacttctcatgaccaggtgccacacccactcatcgaggccacaggatgctacagtgggagcctgaatgagtgctgttcatcacatccttttgtgtcaacgcttgagttctttaggaacttcttgagtggctgtttgtcactgtgttggtctgaccgtggatggttctgctgcgcccccatacacagccacttatggtgctccctcccctctccttcaactgctggcccagcacctctgtcctcatcgtctcatctcttaccctgtcagtttttccccgtctctggcattctcttctagccatagcccaggtcctctgtccacagcctttcttgccattgctggcctttggcacttggccagcattaactcctgaggtgacatggttctgtttattccaccgggagagtaacaatgacaaggtaaagtagatgttggactattactagatgtgatactgcacttttctcatgtaaatctctctgcttatcttttaaaatctgtgccctttttataataaagtttcatattttaatcttacaattatgagcttttcattttctaaatataactgtgaaaatcttgatgaaatactctgatgagtttactgaggatatatctgcttccttactttaaccttgacaccaggggaaaattattactctaatggttcaaagaatatttttgttattgttttaatcaacataattataagctaaattgagaaatgtatatgacacttctcttaaagaaaaatagatttttttcctctcttgtctatgagttatctatttgaaaataagtaattgtgcttattaatgctatgtaaatcctaacattcattgagtatttactatgtgccaggttctgttccaactgctttgcatgtatcatttaatttagtcttcataacaaccctaagagataagtactaatattaaccccatcttatagatgaagaaactgaggctctaagaagttaaataatttgcctatttttactcagctctaagtggtgaatcgagattccaatccagatattcaagctccagtatccatgttctttactatgccctgtgtatgctatatttttctgttagaaaagtgagaaagagggaactcaaaagatctatgtttgcgatagatattttaaatatatatataggacaccaatatacttaccataatggagtcactccacatgaaacttcttgaaggttctatagttttatctgtaaaatgaaataataactcacaaggtactttatatgacttaaattttgacagactttcaaagtgatagaaaaaaatttgcatcctttttatcatttttgtcataatctacataccttaacatgcatttattaaatgtggttgaaagcttaactaaaatattttaaacagcatttagattttatatactgtatatgtggattatatacttggtaattaacccgtttaaaattgtaaaaaatcttctggctggctttgcattctgatctagcaaggaagcaagacttgtttttaatattaaactaagaaaaacaaattgctaaggtaaatttgtcacgcacagaaatataatctgtgccaatagaaagaattgttaaattatccactgtttaggattagccagctttctgaattagcatggataattgaagcttgacagttcttagtagtattatcaagaatgtctttcaaatgataattttctttattgtacttgattaatttgtaagtaattagagtttagcagtaacctgatgtgttcagtcttcttattaatgtaggtttatattcataatcctaagtactttgtaaactcatttgaatacgtcatctgtattccaccttgtaaattcaatgtttgtttataatggaaacaagaattagtcaatttgcttgtcctgaaactctgattgttataagctcttacttgttaaattttaatatgcaggttatagataccaaggtagctcatagtaccaagaaacctcattgtattaattattttcctgaagtactgtagtgctttaacataattaccaacatagcctaaaaatgagtgttctatttttaaaccttgacataatttaaaaatgggagtttgtacaacattttttgtgggaaaatgattaatctcaaatttatttttgacataaaagcattataaaatgttactccatgtgaacaaccttaattcacctcctgaatttatgttcttattttctctgcttttcttggcttccaggacatttcgctctcctaggactaatatcttagcgctctgtggagataggaaatttgagtcctgtaacttgtttcttaaaagtaattgcagagcatttgtatatacaatgccatttttaaaaaatgatattttagttcacatctgttttccaaggaattatagcttctttgcagatttacttattttccccagatcagtggaaaatccaggatatttattcactagtctcattgttatttatataccattataatgatcctcagacttataaagcatgccgcattctaaccacagtgtatctcacatgatagaaacaaaaactactccctcctcttttcttatagacatcttaaaactggattgagaataaactgagaataattaaaagtctttgcccatgcctatgtcctgaatggtattgcctagattttcttctagggtttttatggtttgaggttttaaatttaagtaagtctttaatcaatcgaattaatttttgtataagatgtgtaaggaagggatccagtttcagttttccgcatatgtcgagccagttttccagcaccatttactgaataggagatccttttcccattgcttgtttttgtcaggtttgttgaagatcagatggttatagatgtgtggtgttatttctgaggtctctgttctgctccattagtctgtatgtctattttggtaccagtaccgtgctgttttggttactgtacccttgtagtatagtttgaagtcaggtagcatgatgtctccaactttgttccttttgcttaggattgtctaggctatacagggtcttctttgattccataatttaaaatagtttttttctaattctgtgaagaatgtcaatggcagttttatgggaatagcattgaatctataaattactttgggaagtatggccattttcacaatattgattgttcctatccatgagggtagaatatttttccatttgtttgtgtcctatcttatttctctgagcagtgatttgtagttccccttgaagaggtccttcacatcccttgttggctgtgttcctaggtattttattctctttgtagccattgtgaatgggagttcattcatgatttgtctctctgcttgcctgttgtcagtataaaggaattcttgtgatttttgcacattgattttgtatcctgagactttgctgaagttacttatcagttcaagaagtttttgggctgagataatggggttttctaaatataaaatcatgtcatctgcaaacagagacaacttgacttcctgtcttcccatttgaataccctttatttctttctcttgcctgattgccctggccagaacttccaatactatgttgaataggagtggtgagagggggcgtccttgtcttgtactggttgtcaaagggaatgcttccagcttttgcctattcaatatgatgctggctgtgggtttgtcataaatagctcttattattttaagatatgttccatcgatatctagtttattgagagtttttaacatgaggggatgttgaattttatcaaaggccttttctgcatctgttgagataatcatgtggttttagcaattgcaacaaaagccagattgacaaatgggatctaattaaactaaagagcttctgcacagcaaaagaaactatcatcagagtgcacaggcaacctagagaatgggagaaaatttttgcagtatacccatctgacaaagtctaatatacagaatttacaaggaacttaaacatatttacaagaaaaaaaaacagcatcaaaaagtgggcaaaggatatgaacagacacttctcaaaagttttcacagccaacaaacatatgaaaaaaatctcaacatcactgatcaccagagaaatgcaaatcaaaaccacaatgagataccatgccacgccagtcagaatggcaattattaaaaagtcaggaaacaatagatgctggccaggccatggagaaataggaacacttttacactggtggtaggaatgtaaattagttcgaccgttgtggaagacagtatggtgattcctcaaggacctagaaccataaatactatttaacccagcaatcccattactgggtatatacccaaaggaatataaatcattctgctataaagacatatgtacacgtatgtttattgcggcactgttcacaatagcaaagacatggaaccaacccaaatacctatcagtgatagactggataaagaaaatgcggtacgtatacaccatggaatactatgcagccataaaaaagaatgaaatcgtgtcctttgcagggacatggatgaagctggaagccatcatcctcagcaaactaacacaggaagagaaaaccaaacactgcatgttcccactcataggtgggagttgaacattgagaacacctggacacagggtaacaacacacaccagggcctgttgcagggtggagggtgaggggaaggaacttcgaggacaggtcaataggtgcagcaaaccaccatggcacacatatacctatgtaccagaacgtgtatacctgcatgttctgcacacatatccccccaccttttttttttagaggaaataaaatattcaaaaattcaaaaaataaaatgaaaaaaaaagtattgtggggcttcaccagtatagcaaataactgaattcagctacattctccccatccaaagtctgggcttttctttttagtttcatgtaacttgggagttgggggtaggtttcagatagaagttgtttttggttttgtttcaattctatcttctcttttttataagtgaggaaactgaagcccacttaatccccaatctaacttgttgctttactcctcttgtcgtctcttttcctggaagtacacacttattttctgtctacaaggaaccagtgcaagttctaatctaatcatagtaatttttaacacctgtcttaaaaaacattttaaaacaatatttaaaatgctcttcgttttgtgattgtttcctctggacatgcagcagtttcaagatggcttttactaaactttacagtgatgtctgcaactaacccaactcatagggaaatttcctttttttttttttcctgttcagtttcttcctgggtagcacaaaatctccccttacgtgctcatccccacatacagtggtcaggttatcacctccttgcttagaagagtgtcagtctctgtggccttgatattaactcttccctgccacacttttctgtgaaatgagatagtaatggtgcctgcctcacagggttattgtgagcattggaagaattaatccatgtgaactatttttgagcaatccctgatatataaaaggctttctgctaagaattagctgataaggaatgtaggaccatcggctggtgggttgtgcacaggcaatgggttgatgttttgtagggtggaggcatatttgggagcagctgggtgtcgggttctactctgctcccttgttctcccagtgcaagatgcttccccctgccttcatcttgtcaaggctcttggttccttcacacctttcccttcagcttcaatcgctcttctgcctccctttcccccaacccaagcctttggaacagaaaatctctacagtgtgcaacagaatcattcctacctcatatcacattacctgactttcaattataccacaaagctatagtaaccaaaacagcatcatactggtataaaaatacacacatagattaatggaacaggatagagaaaccagaaataaagccacatacctataagcaatggatctttgacctagttgacaaagatatacattggagaaaggacaccctattcaataaatggtgctgggaaaattgggtagctatatgcagaaggatgaaaactggactcacacctttcaccatatgcaaaaattaactcaaggttgattgaagatttaaatgtaagacctgaaactattaaaatcctataagaaaaactgggaaaaactcttctggacatgggtttaggcaaataatttatgaccatgtcttcaaaatgaaatgcaacataaacaaaaatagataaatggaacttaattaaactaaaaagcttcttctcagcaaaagaaacaatcaacagtgtaaacagacaacttacagaatggaaaaaaaatttgcaagctatgcatccaacaaagggctaatatccagaatctacaaggaactcaaacaactcaacaagaaaaaaaaaaaaaagtaacctcattaaaaaaatctccatgctgttttccaaacaggttgccccgtttcaggtttcagattgtcctttttggagatttctgtaagaactaaaaatagaactatcattcgatccagcaatcccattactggatatgtacccaaagggaaagaaattattaaaaaaaaaaagataccttcattcatatgtttattgcagatatatataagcttgcatgttctcacagatgggggctaaacatgtacacatggacatagtggaataatagatattagggaatacaaaaggtgggaggggatgagggttgaaaaacctactgggtacagtggtcactgttcaagtgatgaatacatcaaaagcccagacttcagcgccacacagtatacgcatgtaagaaacctgcacttgtatcccctcgatatattttaataaacaatttaattttaaaagaaaaaattatttctgcctcacatttaactgtttctctgtgcctttttttctgcttcaagaaaagtgtgagggactaaagaatatgttaaatacatagatacgcgtagattattacttcagccataaccctgtcatatttaacaaagcaacaaactgcgtttggtgaataaagatttccaggacacaggaaccttcaagtgttagagagcagagtttagaatctgtttggttacttctagtaaagaaacctctgtgctcagggttccccaccctgcctaataaggccaccgccaggtctcccaaaccaacccctactaacctcattgtccgtgggaactgtatgtctttgcaccttgtatatcctcattactacttgtctttatagttttgctttaacctgattttaatctctgtatcttcctgctgcattttaggcattagaatttttacagaaattacattagaaacttgttctttaagttcctaactcaacttgagatactgaagtcagtggtggccaattgctccctgaccccttgttcttttttttttagacagagtttcattcttgttgcccaggctggagtgcaatggcgtgatctcagctcactgcaacctttgcctcctgagttcaagccattctcctgcctcagcctcctgagtagctgggactacaggcatgcgccaccactcctggctaattttgtatttttagtagagacggggtttctccatgttggtcaggcttatcttgaactcctgacctcaggtgatccgcccacctcagcctcccaaagtgctaggattacagatgtgaggcaccgtacccggccctcccttgttctttcttagttgaatgttgttgctcagcacccagaattcttagtgtcataaatttcatctctttaatttgaaaatcaaacatcttgagtacccagcccaggaacttgaactctcctacacaagttgaatacagtagaaagattagataggcatttctaaataattggcaagtccctactttggggctgacggttttaagatcaatgaacagaccatgtggacagcaatcactcatcccatctctttactttgttgaatgtcttaggtaccgaatcttgagggttactagtgatagaaggaccaatgagttctacctccaggagcctcctactcttgtaggaaggacaaacaagtagataaataattagaatgcaaattgaacactgtctcagaggtctgcataaatagctatggaatcatagggaaggaagcagttatccaagggggtcatagaagactctacgagaaaatagtgtgtgttttttattttgaaggatcagttcacattttctacatgggaaggggagaagatgcagaggaaattgcatacaaagacacagtgtgatggtgaaacagatttagtgggcagaactagagaacactgcataaggaaaggtgagaagtgagcctcttgcatgctttcataaggagctggactgaatcatttagcaagaaccagctaattgtgattgaaacaaggggtaaaatacttaggcttatttctgagaaagtagtaaagtagaggacatgctttgaagcttaaaaaaatgagggtgacttctttataataaaatgattatactatacatttaaaataatttttgaattttgagttatttttgttgaaggaagctattttgtattgtgtgtgagagaaatctgtgttctttcaacattctagtagtgagaacaggaaaataatggatgaaatggctaggataggaggattatcataaaatagagtgtattttgtatgcctggcataagtttcacagggtttttaatattgttcttgatgtttcataatgatatgacaaataaattttgtttagatgaaaatgttttctttgctgataaatatactctgtccaagcagtagcaatgcatttgggtgtcctcacttttatctaataaaactttcatggttctatcattttacgaaagtatattacttttcattttccatgatgaaaatataataatgtaattttttatgaaatgtacctgtgggaaatgtataatagaacagagtttggtttcatttcttttttttctgatgtagaacttcagagacagaataattttctttttggcacctaatgggttaataactcatggtacaaaaacccattttattttaaaggaaaattgctttgaaaaatatgcattaattgaaatcctatttaagggtaaaattatgttattgattatgatcaaaatgtcccagacagtgatgaattcatcaattcttgtttcagtggcattataaatctcttagtaagagctagagaacgtgaacaagatgaatattttcaaattatagtggtacattacttatgttaactttcttaatctgtatactgtgtaggaatggaaatagctctttttcagaggcaatatagaaaagtagcttacaatgttatctgtcacaaatcaaattggaatgaaacttgttccaatataaaccttaaaaatccaaagctggaagttggccaaacaacatatttaagttaaaggaaaaaaggcataaagtgtaaaattaggcatagccagaaatgaattgtatttagaattatagaataacagccgcttgaattcatgtaactaagaaaggtattataacatttaacattcataatatatgatcaaagtctgaaagattgcaaatgattaatccataaaaagttatactttgaaagccctaaagccactattacctatgaaaattgaagagttttcagtgttttacagcttgattctttccaaaggtatatattgatagaatgtattatttcttctttttactactaaaaaatcggtaagacgtggacttgttttaaatgtcataacattttaaaatacatgcacccatttaaaaatccttcttaaatatctttaaaatatagtttgtcttgagttgtacttgcaattcacatgacttatatgatattggcattgtaagtacctagttagtgcttagaatgggatgtgtagatgatttaagttcagatcttcaggctatttcttttttttttcttttgttttctttttctttttcttttttcttttttttttctttttttttttttttgacagagtctcactctgtcgcccaggctgtagtgcaatggcactgtctcggctcactgcaacctccgcctcccgggttcaagcgattcttctgcctcagcctccctagtagctgggattacagtcacccgccatcatgcccagctaatttttttatatttgtagagacggggtttcaccatgttggctaggctgatcttgaactccttacctcaggtgatctgcccgcgtcggtctcccaaagtgctggcgtgagccgccatgcccggctaacacactttcttatatcataggttactatggctatgagtgcagaatattatttgtcttattttgagtaaatattatctcgttgtatgactcttcacaagcattttattaagtatgtctttgcataaagagctagactctacagaaagaaagttgaatagatatgatgcttgctcagtacaaacttctttaagaccagtagaatatattgtaagaaatgtataggaacaaaaaactgtggcaccaatgcaatgcagtgatttttaagtgcatctggttaaattatgtggaatttggggatgttgtaccatgcagaggtttgattttgccacaagagttggcaatctggttgcatgccttgtcataaatgactctaaaatctcagaattgttctggtgacattttatagtattatattttttaagaattctaaaatacctatgtcatcttcttcctataatcctctgaggcagagatgtcattttaggttttgagttgcagaaacaagcctccaacaagcctccagtgacagtgtttgccagtaatttggtgcttgtgctaggcctggaaccctcatgtccctactatattctgacaccagaccatactgaaatggcagcagtcatgagtcatgacaggggtgttcacatctgactacaatatggagggtcttccactaattttcagtgtggatttccatgagaaagatttattacaggtgttttctttcagccatttgaatttaccaagtgtaatttttaaaaattatcattgaaaatatggcaaaaacaacttttggatgccagggtgctactttagcagatgaaacattatgtattctttgtcctgaaaactcttaagagaactttttgttgcttagtttcctgtatttttttaaatttagtaattgttggaattattaaatgaatgtaataaaacacatattgatggaaagttgatataaatttactcaactttgattttaaggaagtttgttaatatagatttggggattttgatcatacccacatgtaattattactgcagttaatttgtaatttatctgcaatactgaacaaatgcaatagtatcaaatgaatagaatactatatataatatacaaaatatgtctgtttaattaggagccaactcttctgtaacactggctctgtcaaggatataataatctactatggataattgcatcaatgtattcattttttcattcattcattctagcttttaagcaggatttgtttagcatctaccattgctaggccatgtactaggtggtgttcatataatatgaacaagcccaccacatatttagcccctgtcctcaagggtcagtaaaattaaacttatggcaagttggcaggatacgacaggcatctgtaaagtagaagtcctgggacagcgtagctgagttctgaaagtagatgtttaacaaagcagagagaagaggaaagctcctaactaaggctttgtgctaggagagtacctggagggtgggtgcctgggattgagaggagtatggctggagtgtcaagggggagagggaaggagtatgtcttatgctggaatacatctggaaggccagctgttggaaggtcttgttaaggataaaggtctgtgttcaagatcaagaggaatgtaaagctgtttcaggattgtgttgggatggtggtggtcataagattatatgtgctcttcaaaactaatactctcattgcagtgaggagcaagggttagaggggacaggaaagaatggtaggaggtaattacagacttgcattcatgtgctatggcagagacagtgctaatgggatagattcaatgcctagaaaggcaattcaattgtcggattgaatgtggactacatgtgaaagagaggttcaagtatgacatacaccttttagcttaaataatgggatggagggtgaggccattcactagcatcctgatttctgggagaagatgagatcacagatcataaaatgtcagataacttccatcttgcctgccagctccattcagttggtagtggctgcgtagggccacagattgagaaggatcttaaagctcattgtagaatctttgatgatcaacaatttgacttaaaagtactgagagtgggttgtgtttctctatatcccgaattagttcttgctcttaaattaatacatatgtagctgaaaagttgccagtagagagaatgtttctgtaactgctcttgttagcgaatgccacctatgtgcttggtactgttgtaaatgtacgctctactttgtgccatttagtccttgaatgtagattagcatttagaatcatatagattgatattggacctattctgttcaagaataatttatataatttgggcctaataggcctttttatactgggttgttaatctgaaatgaggtgaattcctggtgtatagggaccctgaggataacattgtgtcatgccccttaatattctaaattactattaatgaataattaaaagtcagtttacatttcactcagcatagttatctctcatttatgtgtgtatgtgtgtttgtaattattggtttgcagctcatattttatgtaaatagatggtagcagaagctcagaggaggaaatgccatatggtattacagttaatgatgacccaagtgtggctctcattttctgtatatctatctcacagtgccaaagaccttccaagtaattgaatctttcctttctgtgattgaattccaaaggggatttccataattcctttttttccctgttaaaaccatcaaattaaagtaattctggcagtactgtaacttactaaaatttcttttggagcaaattatatatgaacactcataagagctagggagaaaaacatgcttttctgacttgctaattagtgttaatttgtatatactctctctttgtatatacgcttaaaaaaataaaggagacacgattgtttctggaagaccacacagttatactaggctgccagataaagtttctggaggcaaaaatccctacggtttacttgtgaaagtgttggaatacaattacgaatcaaaaaactaccaaggaaattcttaaatactcatgggttaatccaattgtgattttccttttttatagacttcatggcggataaagctcagggttttattcaatacaaatgtgataatatatttaaagcataacaactatattgtagatcagaatgccaaaatcattaatatattgtaataataaattatgtatatttttattttttgtggaattaaagtatgaaatttatgaaaaagatgaatagcattttctaattattaaaattgacattggtataactatgcatacagaattgttagaaaatcatattggggtttaattaaaaagactagagcattatttttgtttgaaagattatgattttttttttaagtaaatgatatggtttggctgtgtcccgaaccaaatctcatcttgaattgtagttcccataatccttatggttttatagggggatttccccccccacttcactctgcacttctccttgctgtgccgccttgtttagaaagaagtgtttgcttccccttccgccatgattgtaagtttcctgaggcctccccagccatgtggaactgtgagtcaatcaaacatctttcattaataaattacccagtctcaggtatgtctccactggcagcatgagaatggactaatacagtaaacattaaaaaattgttttctcttgaatgaatcagaagatttgaaaataaattttgaaggataaatgtcaatttagaagatgctattggataatcttttatcattatgaagaaagataaattaatcatattctgatacagtaaaatagattgttgttatctaatgccagttgaatgtgtgtggcacaaatcgtggttgggaactcgggctcctcaggcaggtaacatgggttcaaaacctgccactgttacttaacagctgtgtgattttatgcaaataacttaatctctatccctcagttttcctttgtatgaaatggggatactggtaatatgcatctcataggatgatatttcttaatccataacttgataactgttaaaaacatgtgtatgaacatggcttttcacagtgggccagaaggagagctacaataatagcaaagtagtttgtcacaaatgtggaagctcgactgttagacttgatcctatcactactttaaacaagtctcttaactttcgacacttctgttttcctatatctgaaatagatttagtaagatcattctttcctatagcatgtggtttttgataggctcaaataatgtgaaatacaaaaccacttactttatgtgaagtacctaaagtcctctctgccttcaaaaagagtgccagtgagtaggtacttgttgaacaaagaaagcagtttttgtttctgcctgtatgtgtataaatggttattcattgaaattgttttataaatactaagataaaaaaggggccatgctcaacactgaggaataatacactgtaattcttaatctgttttaactactatgaagaatatttagatactgttggcaaccagttagaatactgtggctttatattttagaaggtaatttttataaacatttcctctgctattctcacagtagcactgtgaagtagatattataacgatttgtcttttatgcaagggaaaacttaggcagaaaaaaattaaataaccatataaataattcaatgtgaatgtaaggaattgaggatcagacccaggttgtctggaaacaaattctatcacctaagattccaaatacacaaaatttaccaaaataatgtttatttacccattttgtctattgaaaaggtaacgctaattccagagaaattttctaagattttctatgagaagattatttgcaacatcctattaaattatgagttgatttttaaaaaattattatgaaaaatccttaaaatatttcaaagaacgtgcttatacacacagagacacacacacagacacgcacacaaacacacacacacacaaacacaaactcccattctgaattaatcagtcttcatgtcttgacatatttgctttagcaaatgctttcaagaagttctataggtacagttgaaactgctttggacctctttccagtctcattaaactgtttgtatatccttcctgaatccaaaaacaatgcaatcatcgatttttaaatcttttaaactcagttagaattctctagagcaagaaacccaaagacttcacttaaaattgtttatgacagctagtaataaaatatcttcaaatcattgattgactagatttttggttttggttttgaattatcacatagagtttctaaaggaaaagatgctagaagctatacagttttggtacatatggatctctgaaaggcctgttttatatcttttgtatttgaaaaagatgctcagaatactgatgaaaaagcaaagcttttagtcatttagaaggaatttttaataaatcttatcggggggttagttctcaattctttgtatttattttttcttcttcttcttcttatttttttttaataaagaggaagtgtcagtcagctgttgcccaggctggttttgaactcctgagctcaagcagtctttccacctcagcctcccaaagtgctgggattataggcatgagccaccacacctggctggtctcaattctaatagaagagtggcatgggtagaaaccataaataataagcaatctaaaatatatttgttttgaccttatattgtgttgtattgctttttttaatcctttgacttcaggtatatttaaactaaatttaaaatgaattctaaggatactattggtcttaaaatataaggaactaattgaacatatttaaaggaatttatatatgaaatgatagagactatggtactgagaaattggaaacaattgttaactgatacaacacttgtgacacaacctgttaatgaggcacagtgcagcagttaagaacacactgaaagtatgtacataatgagctgagaagatcgctatgacatatcagtcagctggaagagcaggttataaaattgtgtccttaggatccagctttgtaaaggcaagctagacaccacgtatgcccaaatatgaggtgaccctaaatataaagatcaactggggcggttttgccaccagtggacattgatgatatctgaagaaatttggggctgttacattgaggggtgctactggcatccagtgggcagaagtctggtaagctgctgagcattctacaagtcataggactacctcaatgacaaagaactgtctgacccaaaatgtcagtagtactgagggtgagaaatctcgacataaggtaatgctaaatatctgagtattatttttaaaagtatgtggcccacattatgcatatgaaattttagggataaagatgcaaaagtcaactatctacttataacaattaatttattagtgaatgaaaatcaactatacaaaaaagatagcaatttagaaatattatttttatcattatcatgaaataattttattcacacttttcacatatgtcagcaccagcactgcctaaagttgcttgagttagagcactctctaaatccacttacgtaacctgagaagcctgcttttttccttcttcccatgggcatatattgaggatcttgtcagtgtgagcacagtataactttctaaaagtgatccttaaaaagcttatttacaggagttaatatttgtggttatgaggtgtaactagtatgaaataattaccaattcggtacggaggaggttgtttcaggttaatgtgtctcctcaaactactttctccttcaaaatgcaataattgagagagcatttggtaatctggtgaagtgaagacaggaatagatggagtctccttttcagaaggatagattagttatagtgatggagggaacttgtcttattttcagacttacagagttccacgtaagtgtgttacggtgtgcacgtgtgtatgtgtgatcatgcaaagggaacatcgatgaagatgtacatcaaaatgtagtcagtggcagtgtcatttgagagattttcactttctctgttttctgaaaaatgtaccaggagaatggaggtttgtaatgagccttacatttataatcagaaggaaacacagtgtttctttccagtttaaacaaacaaacaaacaaacaaacaaagccatattgtggttgctctcagttgactaaccctcacaggataataaagtatttcagtatgaactcctgctctggcctatcctatctagaaaaggcaatgtgtttcttatctttcctctccttagatcttctcgacctctcattccctcacattctctccaccagcaaacaaaagaacataaatacaattttggggcatttgggactttgctttctgaaacagttgtcacacccatgctgtccttacatgtgagtaacctcatccttcctcccacagaattaatagatcatcttcactgtgagttcccttaattttatatctttgttaggaagactccaagagaatggacaaagattattggactctaggataagccaatggagaaaaacattaggagacaaagggaagcttttctcactcttgagatcatacctagggatatctgtatactttgtagactgttaaaatctctctgaggtttcagccataggcagagagttttcttttttttttttttttttgagacggagtctcgctctgtcgcccaggctggagtgcagtggcgggatctcggctcactgcaagctccgcctcccggggtcacgccattctcctgcctcagcctcccaagtagctgggactacaggcgcccgccactacgcccggctaattttttgtatttttagtagagacggggtttcaccgtttttagccgggatggtctcgatctcctgacctcgtgatccgcccgcctcggcctcccaaagtgctgggattacaggcgtgagccaccgcgcccggccggcagagagttttcaaacctgcttcaaaagcattgtggagggtgtgcagcagttgcagctcctgtggtcacactggagaggaagtgttctcttcactctcgtctcctagcaacagtttccagcagggcagaaggattgttggacctgcttttaaggcagcttctacttcggtatatattggtgtagaattcagtttaatgaatatgaaactttttaaaggtaaacctaaagtcacttttagcaatcttaacagtgataaatggccgcttgagagtcacgtatgtccgtgctctaaattatagccttgccatcatttcatcatttctggtgcactttgctgtctaattcccaggcagaatgttcagatttctgtcttttcttcaaaaatgttaaaaccaatgacatacattcacatatgttaaaaaaataaagtagtagagaaagacttatattcatgtaccaaagttttcagtgcaccacttaatccccagccctgctcggcttaatcacttactttacatgcactttactgaagggctggcaggttccagttctttctgtatatgctgtacatatgtgtatcattagttctcacattagatggatttctaaatggcatgattgagactcataaaagtttaatacttttttttttttgagacagagtattgcactgttgcccaggctggagtaaaagtttaatactttttataatgtgtaaccgagaattggaacccaaatctctctgaatctacaagtctgttcctcaactttgattaatgacatacacctttgactttctacagttagccagatgcatggtcgtgtgggggagatgggcttcagtttcactagagacttagatgatgtgtaccatcctggtttgtcgagatggctctgggttagacatgctgccctggcaaaatcattaccagtatcctatttcacccttatcttaaaagtgctctggattgtatgatgaattatatggttaccttaactaacaatttgctagtcatcttagtaccactaaactataagccccatgaaaatagagatttttgtctgtttcattgatggttatattacctgcatctagaacagtgtttggcatgtaaatgcactcaataaatacttgttgattattatattgacggagatttagtatgtgtatccgtcaaggttctccagagaaagaaatgtttatatacatatatgttaaggaattggctcatggttgtggcggctggcaaggctgaaatttgtgcggcaggctggcagactggaagctcagacagggttcctgtgttgcagtcttgaggcacaattccttctcttcaagaaacgtggtttttgctcatatgaccttcaactgattagatgaggacccccaagttttttagggtaaacttatttacttaaagtcaactgattgcagatggtaattatgtctacaaaatacctccacagccatatctaggtgagtgtttgacctaactgagcaccagagcccagctaagttaacacataacatataaggctgtatgtttgtgcacactctatgagatcagtgcctgttggtaaaaggagcttactcacaaactgtcaagatgacatttaaaagagagaacactggccggctgtcgtggctcacgcctgtaatcccagcactttgggaggctgaggcgggtggatcacttgaggtcaggagtttgagaccaacctggccaacatggtgaaaccccgtctctactaaaaatacaaacattagccaggtgtggtggcacatgcttgtaatcccagctactcgggaggctgaggcaggagaatcacttgaacccggcgggcggaggttgcagtgagtcaagatggcaccactgcactccagcttgggaaacagagcaagactccatcttaaaaaaataaaaaaagaaagaacaccaaggatttaattacctcagaggagttgcatatagaaagaatgctgccatgctttaaacacatagtgaccattggaatcccatttagtataatgtaaaatcacagtacagagagatattacaaaaacgtgattataaaatctattttttaggcagagcattttgaagcttgctggagaaggctgtctgtctttcctttgtcaagtagttacatgtgatatttaatacagtagagttatataatactgccattttacatcgctcgtctttttacacctttcctcagatatttgttgatttataataaattgtgacctttctgtaattagttgggaatgggtgatgtgggggaatatttaggaacttttctagtactcaacaaattttgccccgtagacttttttttttttttttttttttttttttgcactgtggacatatagagatggttctaggacctagcactgggagctctaacatgatcttatatagctagaaagaaagtacttcttcattgtttgcaatagaggagtgatagataaagtggtgacagaggaaagagacaagaaaaggaatataaagtagggaaaattgtgaggttgtgatcagactgagctcagaaacaaactttctgcttccttggtgagtggcaggaattactacaaactctggcatgctttcttaattgtaccacaaaaagtgaaggtgaaacatgaccttaatacttccagaaagccctgaatagttcttgtttgacatataagtatgagtaaaggattcaggtagcttctatatattattaataattcagctttaaagccaaactttcttaactacctctcacttagattcctggattttagatttttaaggctgttaagacctttccatagtgcatctgctcatgcgtttgaatcacaattttgtaatattaagtaaccaaattaaaatacccaaataaaatgagtgttaagatttgttaagtctaaaatagccctccatgacatctgacctaatatgttttttctccaaaaacagattgtttgttctcattgatttacttattgcacataaatattttgaaatttaatttataaatttatttagcaaaatactacctttaagatgcatgtatttggattaatatatcaacattattctagaaagagaactctctttatattatattacattattatttatattattattctttctctctagaagagagagaatgatgagaaattgctcagtgtttacctttgtggagagggctcagagggaaggggaagaagcttttactctttattttgtatctttatgtatggtttcagcttcctagttaaatttgttttacttctgtattttttgtccttggctgtggacttatgagccatttttgttttctttcttataatacaatcatgtgccacataataatgttttggtcaatgacagactgcatatgtgacagtggtcctgtgagattataagactgtgtttttaatgtaccttctccatgtctagatatgtttaggtacacaaatacttaccgtgtgttacagttgcctacagtatgcagtagagtaacatgctgttcagcttgtagcccaggagcaggaggctctaccatacagcctaggtgtgtagtaggctataccagctgggtctgtgcaagtgcactctataacgtactcacaatgatgaaatcacctaatgacacatttctcagaatgtatctgcaatgttaagtgctacacaagtgtactttctatttaaaaacaataaattcagctgggcatggtggctcatgcctgtaatccaagcagtttgggaggccaaagtgggagaattgcttgaggccaggagtttgagaccagcctgggcaacatatcgagacctgcatctctacaaaaaaatttttataataaaaaaattagccaagcatggtgacatgtatctgtagtcctagctactcaggatgctgaagtgggaggatccctggagcccagggtgtcaaggccacagtgagctatgattacaccactgcactctagcctgggcagaagagagagactctgtctatgaaaaaataaaaaaaaaaactttgtattttaattttaaaaaccttttatttattttatatgtttggtttctttgtgtgattttacctgggaaaactggaatctgctttagaaagtttaggccgggtgtggtggctcacacctgtaatcccagcactttgggaggccgaggcgggcggtttacgaggtcaggagatcgagaccatcctggctaacacggtgaaaccgtctctactaaaaatacaaaaaattagccaggcgtggtggcaggcgcctgaagtcccagctactggggaggctgaggcaggagagtggcatgaacccaggaggtggagcttgcagtgagctgagatcttgccactgcactccagcctgggcgacagagcaagactctgtctcaaaaaaaaaaaaaaaaaaaaaaaagagaaagtttatgcactgtggctcagggtcagaatttgtctcctttcattctggaaatgacaagaatggggtttggtgggagtcttttgagaagacacgtagagtacgtgaatagaagcaaggtggctatcaaacaatctcatcagttatatccgatttgttgattattacttttatgtgaatactttttccttgaaagcacaatttagttttcaaaagacaatttttgagtatttcaaaaagcactttttttttcttccttagcatttcatgtagtggcccatacagctaaacaactatgccagcaaaaaatttataggatcagagaaataattaaggaatccctgactttgttttttccatgctatgaaagagaaaactctatgaaagaagagctgcaattgacctcttttattgtagctcttagctgtcttctgtaagacaggtaaggtttgccatagctcagctgcataactgagtgactgtttgcttcttgatgcacaaaaatcagctggtgtccttgaagatttcatcccttggatttttagtttgggtaccctgtcttttccatgaatgaggctgcaatagttacaatatttcttttccttttttttgatattttatgtaatttcctgtaaagaatcatgttaggaagatagcaaaggtcacagaccttcataaaattaggctgtcagtattcaatagaatagtagtcaacaaaattgtaaataaagccattttaatatggacaatgttataatatgaaaaataaagacatggaattgaatatgcagttaagtagatactctattaataagccacggaaagaaaagttgaatacactgaaatggtattcaataatattaatagcaattgctcaataaactatgactattactatattctaagagctatgctaagttctctatatgcatcttattaatcatgaaaataacttgactgttttttctaagccttacttagataagcttttggtagttttccaataacatacagctatttagtgtcagtgcagggacttcaaccaaatctataggatttccaaaccatattctttgcagtataccgtattgctttcagatttttaaatacacacatacagaataaatctctgaaatttatttttcataaatggcatcaggttagcattgcctagtggtacttagctagctacaagtttactaagaaaattggggctctataattagggccagctaggggatacaccaccgtatttatgggaatcttgttcttttttgtggggagtgcctgcctttctgaaaatattcaacggttattttttatggaaggttaaggctttgggaaaaggcttcagactttaggctgcagatacatattctcccagggagggattaggtctgtgcgggctggcagtgatgatggctccagtgatggtgatcaccagccctatctttagatactgagtataagacagaatccatttttatcctgcaagtacatgttaacctttgaccctgattgctactgccaagtgtggtctggactggtggtgtgtgcttctccagctcagagccttccatggggggtgcactctgcctggaggatggtgtggactgtgagggtggggcttagtagccatatctgggtggcaggaggaggaggagcacaggcagggtcctgggaactagaaagataggcaagccgaggagccttttatgattccaggcaacttgtgcatctccattgccaaaagactgaatgtgctgaaagtgggagcgttcaacctacttggagtcagagaggaggtagagctgggcttgggagaatttccgtctgtgcttggccccaaagctgctgtttagcaagacatgaaacagtatctaagaaagattaaatgtatgttttctatatatggttttacttaataatctgctgcagacagtgttgctgactacaatttgaaaaattatggaagtccacaaggtaataataagttgaataatttattactacacgaagtaaaatgagtattaactgaactaaattattaaattgaaaatttagtgtacttcagaagacaaaaagcttcagcaaaacactggataaaaacctttcagaaatgataaaaatacattgtatattaatgaaagccactatattcataggctaaaaataaacatgaaattaatattttctataaattcacatagtgattgctttttattagaggtgagtgataaacttatgaacactggatagaggtcttcaggacagctcaccctttcccacagcaagagtccattaatggaaaatgtgtatgattttctgtcgttctgcctccccgccgaaatgggcctgcaaatggtctaatttctaggtaaatttaaaatgtgacagctcatttaaaataattacacatagtgaaaaatatgcttgttgttctttctttcttttttttttttttttttgaggcagagtcttgctctgtcacccaggctggaatgcagtggcatgatcttggctcactgcaacctccacctcctgggttcaggcaattctcctgcctcagcctcctgaatagctgggattacaggcatgcgccaccatgcctggttaatttttatatttttagtagagacggggtttcaccatgttgcccaggctagtctcaaactcctgacctcaggtgatccacccacctcagcctcccaaagtgctgggattacaggcgccagccaccgcgcccggctgcttgttctttcttattacccgtggtgtctttatgtctatgtcaacttttatttctgattagttattgtgtcagtgcattaatatttaggtcttagaaaataaaatagataaggatatacaaaacttttaaacccataatttaaaatgtcgcaatccaccatatcctatattcttcaatcatactatgtcttacaatgaattcagtaaatattcatatttaaattatgttcaatataagaaatttagaaaattcagagtatctcctaatattgtactagacttaaaatattcttacagaaactactaaaaaagaaacaatttaagacttcacatgaggtgaatttttgattagattggtttaatcatttttcttaagaaaaaagttatataacttttctatgatatttcaattttaagtataatatactatattatattcttcataagatttaaatttttctcatgaagcaactacttagtctgagttttcgacactactatacttatattggtttgctaaccaaaaagataatattacttctaaataatgtttgagattatgaaatgttttcaaatatattgaattacagttttgaccaatgattttataacagtgattatgttttatagaatgttagcttaaacataatttcaaggcccagagtaacttcaaaatttggattaaaattaaattgagctaattaatcagtattattttagatccctgaataatttctaagatagaacattataagaactaacattaagcaaatgttaattttttaatatttttggttcttattttatggatcatatcattaaacgtgttcattttttgtcactttaagaatgtgcaaaaaggatgaatgtggctttaggaaggtatgtgttgtgtatttttgagctttgctagtctgctaaaatgctgtctatgacagttctcagttatctcccacccagctttgtctatgaaatagaagttgtaatatctgctaaaaattaggactactgttatcacaaggaggaattatgacaaggaacacaactgtgtaagtgcatttgtgtaagaaaacaaaaacaaataaaaaacaagactagtcccaaagaaaagtattagtgtattccagcatatgaagagaataatgagtgtggagagctagctatagagtgtttgaggaaacaaattgtatttgccttgtttttataatatctgaatctgtaaagaaataatgaaacgtgttaattttttggtaaattctgttcagttttgatagaattattcacaagatataaaaaaataaaaggagctcatgaaaactttactgccaaacttcacattaaaacaaaactagaaaatgacttctctatgttaaaatgataaattggccttagagttaacagagggcggatggagtgacaaaagatcattctttacctgcagagtaatctgcctaagtagcaaggattctgcatctcaactttgtgtggaccttatcatgtccttgattatttacaaaaacaaaacaagataaataaatgtaaacaaacacgaagttcagtgagccaaagttcctcactagtaaagaactgaagtttcctggtacttgtgtgccttcttctgtttgccacgttgattaaataggtaaccagatactgtttctcatgcccccatggttccatcctaattcagtgagcaaatttcctctgacaacactttgatttttgccttctacaatttgattgcaaatttagaaaaaaaaaatttcagtgtaaaatgtcttttacatctaatgctatctttgtgttttgagggggcctcataaagattattctttcactttataagtaaaagaatactagaaataattgggtttgtttcatgggttccatatgtcttaattacctcaaactattgtgagaactgtatgaagatagttgtcaaatcaggaaagatgcttaaccttcactaggttaaatttgtataagtaaaatgttattcatttttttaaatattttatagagtgtacacattttgagaagaccctggaaattgtcagtgcctctgctatccatcatatgtcttctctctcaggggaaacccttatgaaatagttatgtcctctatcccaaaaaagaaatttactcttgcctgctgtgataatactgttcctggaatatgaccttcgccatgagtcttaccatcaagcaagagctcttttcccttctgatgtttgcctggtgactttgctataagcttcaggctagagtttatacctttagcaaaggggagttcagaacctgtggaaaggcctgtaccagcattatgaaccattgccccttcagggaattgtcaagcacagccttacaaacaggtattgcttagacaacttgcagactgtatcagtgactaaggatttccaggacttctttcagtccagcagcagacatactttatgaaagcagtatccagcagaataaaacttaattactaaggactaaatgaactgatgagactaatttaattgtggttatttgtttagatatgttgctgttgttggaatgctctcttatttatggttgtatgaggaaaccctttctcctttttcccaagctgtctctaagcctcagtttaatagactatgctttggtaaactgcagtgaaacatttttagtggtatctcattctcactcatcccttagaattcagaaacagctatgttactaagatttgtgacttgacttggcaatatagttatttgggtaagattcaataagaatcttgctctctttttatcagagcataattggaaacatcaattgtgcaagcaatatcgcatttgagaatgattctcatttaatcagctgtgaaaagccccctattaaagagcaagttcttagttggaagcctgttctcaagactagttatgtatggattcagtgcctacagagtctcccaagaaccctggcttggcacttggtacttggcttacagagcatcagcttcacagaaggtatgatttcttaccagatcagaggccttagagaatttggaagtcatcaagaagagaagaattcacccagatttatgggtatatataaaatctgctggagaaaacgtcttgggctgagtctcctacactcagcataaaaaaatatgaggactataataaaaatcaaatctgagacctctgatgaaaaatctacccagaaaattcttaatctttcatagttgctcaatactataaggctctagattttcagatcaaactcgaggcctgtgtgtttgattaggactcttgttgccttgcatccatgtgaataattagaccaaacctaatgaggctagactttttctttaaagataatctttgaggattatttataatcataaggggtagaatatcagaaaagttttctgaaacaaaaatggagcaactactgagtgtttttccgttcagtgtaggcttttacctttgattttctgttgctttgggtgttgtaaaaccttgtaggagaaggggtgaatgtacagatttttgtctagtagagatacagataatttctatctggtggaaaagatgatttaaaaattatagtttattgccctgttggacattatcccattttattaatatatctaaccaggtgatcttaccataaaattactttgtaaaattgcctttaaacacctacctcttcaaattttaatttcaactggttttaacatcttactggcttcctcattaattactaagtgtataagatctttgacacacattcattttttatttacataagagacatgatttttattacataggaatcatgattttgctttgttgaaactcgtactttaacaggcctgagcaactggggaaatggcgccattgactgtggagaatcctaaggaataagcatacttgttagggataagcatgcggtgaatcaggaagctagtgaaatactttgctttggaaatgtttaattcaaaacagagctttgtttacttaagaatgtttatagcaatgtgaagtagcaagacacaggaagactggcaaacttgacctagctcgtatagtggccaaagtcacagaagcatagagatatgtatgaaaggcgggtgggtggatcgcctgaggtcaggagtttgagaccagcctggctaacatagtgaaaccccgtctctactaaaaatataaaaaattagctgggtgtggtggcaggtgcctgtaatcccaactatttgggaggccgaggcaggagaatcgcttgaacccgggaggcagaggttgcagtgagccgagatcatgccattgcactccagcatgggcaacaagagcaaaactctgccaaaaaaaaaaaaaaaaaaaaaaaagggatagttagcagtcatagagatcctagaataccaaacggaagtacttgtactttgctctgagagttttggggcgcagtgaaagttttttatggaagaatgacagtcctaaggtttccaaaagattcaactggaatgcgtgttttagatgacttggccagaggaaaactgaagatagagaagctaacatgaagaccattgctttagacttgggaaaaacaatagatgcatggatgggaggcggaagggtataaaatgttagagtattagaatttagataatttggcaaatcctttgtgttcttgtctcgtaattgtaggcttctgttaccagggagacagagttggaaagtcacagaattaatggtgataagctttcaaaccggctcctttacaatgagttggcacagaacaagcgtatacaggctagggaaaaaaactcttaggcttactgaagcaaaattctgtacgtcaagaaaacaggaaaggaggcattttgtgcttcataaagttgaaggggtagtaataaacatagggataatattattgtcttacagttcagtgtggagaaaaagaaataatatggaactccttacatagaggaattacattatcattagaacaaattgcatgctgaaaaggaacttcacatttcagcatttcttttatttttttaaaaaatgaaactatgaaagaaactatataaaggaatctgagaatgtcatctgccttcgttatattgtaggattgacagttgagggcttttagagatgctttcttcaaggagcttcaatcattcattggcgttcaatgctttagggccatagttttatgcagaaaaatttttgtatttcctgttattcaaccataattggaaatgaatgcatgaaaatcagtatcaacaaagtaaatttaggaataagtaatttgaaatagtgacttttaaagaagttctgaaactaaatggtgaaaagcaagtttctcattcatctaatgatccaaatttacaaggatttggtaaaattattgttttaattaagatataattttaatttaattgtattttatgatagtcagagttaatagggaaaagagaatacagaagtcaaatatgaggtcaaagtttttacttcttcctgatttcaagctagaaattctgtgtggatagaaggaatgtccatgggactcaaagtgaaggtcaaagtcgagccctgcttccgtactggctgaagacctgtatgtccagctcctgtcagctgtgctcaggggtttctcatgtaagactttgatctctccctactgtttagaattttagaatggtaagcaatatttggttgtgctcctcatcagctggagttgtgtgtatgcaccagtgtgtgtatttgcaagtttgacctcctgaaatctcaatctgatggtggatgtctctaactttattttgctgctgcttttttttgggggggggggcgggtgggaggaggtggcagacggagtcttgcactgtcaccagggctggagtgcagcggcgtgatctcggcccactgcaacctctgcctcccgggttcaagcaattctcctgcctcagcctcccgagtagctgggattataggcacccgccaccacgcccggctatttttttttattttttagtagagatggggtttcactatgttggtcaggctcatcttgaactcctgacattgtgatctgcccgcctcagcctcccaaagtgctgggattacaggcgtgagccaccatgcctggccacatctttttttttttgggacagaatctcgctccgttgccaggctgatgtgcagtggcactgtcatggctcactgcagccttgagctcctgggctcaagcagccctcccacttcggcctcccgacttactacaggtgcatgccaccattcccagatgagactgagtctctgtatgttgcccaagctggtcttgaactcctggactcaagggatccttctgcctccgcctcccaaagttctgggattacagctgttagccaccatgcccagttgttttgcttctttatgggtgtttatttcatttccgtttcattcaccaaatgtctgcattttgtgtcactgtttacacaagtcactgtctcttggttgttaatgtgaaaacttggagaacagaaacaaaacttctctagtgatcttgagcaggaacatagatttgcctgagttcatctaatatattccattaagatgcccttaacaaggcatgttaccttcagtcatctctttaccctctttgtgccaagtttcttcatttgtaaaatgggaaggttagaaacagaactagatcttatttattggttggtttatttctcccccacattgctccacaggaggtggagatggctcaaaaatttcaaagctatttttagccaaacatttggtgctatttatttcatgttgggcttaaagcaaaaatttatgtcactaagattttttttttttctactgacttgttgcaaaagaaaaaacaaatgtattgtccaataataagattaagagtatatgaaaattagagcaatttaacattaacttttttgtgggcaaattatattactatgtaagtaatatatagctgttgctgatatttggcaagtgccttcagaatatttaatttttataatttccactacttttcagtcacagcactcaggagaacagaaccattttaatttttacagaattccttaacccaaggatgatttgtaagtagttattttcatttggaagcctttttctccaaacgtgcctcatgccataatggttttcatttgggaggctttttctccaaacatgcctcgtgccattatggttgagagcagtgcacacaaaatagaccaggctaccaagcccccaaaccggaagcgaatcatgtgactgaggcactcacttgtgtcaagtgacagatctgcctgtgtacaattattggtggaatcatcagaggctgttaatcatcaccaaattgttttccttggaactgttttttatatgattaccactgagaatcaacaaactcttaaatcataatgacagttgaaagacctaaatgtcaaccaaattaagaaataatttcttagagtaatgaaaattaataatattattataataaaataagaaaacttaataacaagatgaaataatgttaacaaagctacgacataaggtctactcttggagaatatttgaatttcagggtaaaaatggcatcagaaacactaacagtctcatataaaatcaagcaaagtcaaatttgaaccttttgagtatgtgggatcctgccatataatcacattggtgatttcaccctaaaagccaaacatttcattgcactgatttgattttaaagacttctaattttctggtaaaatacccagaatgagaaagaggggaagggaacagagactaaagatagaggaaatttattattttggaaattgaatgcctagctcagaatgcagttgattacccttctcaagacccatgtctatgttcattttccacatgtgaaaaatatataaaaggctgttaccccgtgagctgttgtgtgtgaaacttgactcttgtgagcacccaggactgtcctgcatgaaaggaagaaatcaagtcaagtaaaaagatactttgttctttggtataggcagaattaagaattaaactcattatttaaatacttgaggtaagatacagtatttgaacttctcaaaagtgaaattagggaattttagagattaaaaggaacataaatgtttaatattacaggtgagaaaactggagtctaagaatgtttaattaaataaagatatgtctcccagcactttgggaggccggggccgatggatcatgaggtcaagagatcgagaccatgctggccaacatggtgaaaccccgtctctactaaaaatagaaaaattagctggccatggtggcgtgtgcctttagtcccagctacttgggagactgaggcaggagactctcttgaacctgggaggcggaggttgcagtgagctgagatcacgcctctgcactcagcctggtgacagagcgagactccgtcttaaaaacaataacagcaacaacagcaaatgtccatcactcttctcgtgtcagccattgcactagtggctggtgatacaagctaaataagacatcaaagctctgcctgaagaagtgtgcattcatgctggaggagagaggcaggagagtgtatgggactgtatccttactgtgggaagtgatcacagctatggtagaaacagcagaacagggagcttcctagcagctgtggtttgagtcctcagggtgtgccttggagaaagcactgggattacaggtgtgagctaccatgcctggcctgggttttccattttttaagggtggggaaggaagaggaggaggagggagaaaccagcagcatcaggaggccacagagccaaaaacatttaccacctggccctttgcagacaatgtttgctggcccctgggttagacagggaggcctgtgagggtagatgtccacacctgcagatgcattccaaccctggagaacagccaaagcccaggtatggagaggtgaatgcacaggctgttctgggaactttggcttttttgtttcaggggagtcactattttaaagaaatggcatccccactggagcccttttgtaaaatgctggttagttttgttgacacaagaccgtgtggtatatttttcatgtacttagcagtctctgtaactgtctcatttctcctttactgttttccacttctaattatttagaagtgattaatgtttaaacattatttaaattccctcacacctagaatgtctagggcaatgttgaaaaatagttttccagtcgttagtctcttgtttagctcatctagctacacacgttcctccctccctcgcttcatcctgccatccctcacatcacaaactctcctcccttcctcccccacctcatgttattctgtcatcccaggcacattcagggtcccacggaaagagactgttctggggacaccagtcatggggtgcactgggcctctgcattcagcaagtgggacaaaactcaggcaatctgcaacctccaggtttgtgtgaattcacatgatttctcaactagaaaatcagccaaatgtgtgaagttctggaaatccggttttatacataattgaatttctctagaaactggagttttaggagttataagtcctcccttcccagtgactaaatggatccttttttttttttttttttttttttttgagacagtcttgctctgtcacctaggctggaatgcagtggtgtgatctcagctcactgcaacctccgcctcctggattcaactgattctcctgcctcagcctcccaaataactgggcttacaggcacctaccaccatgcctggctaattttttgtatttttagtagagatggggtttcaccacgtcggccaggctggtctcgaactccttacctcaagttatccacccacctcggcctcccaaagtgctgggattaaggcatgagccaccgcacccggcctacatttttttttttaaaggtttagcctggtgattttatagctcatctaggttgtaaggaatagcaatgaatcctaaaagatatgtactaaagatacattcaaaattaatacatgcataaagtataaattaaatatgacaagtattgaaacttaacactatttaatattttaaatgaaaaaatattttcacaagggattgtactgaacaaatcctttgaatttcagctttgcttatgttttccagcaggaaaatgattataaaatatacttgtaatggagaagttagcctgattattttgtattatattagaattaccaattacatttgtatctaaggacatttgctatattattgtaacaaactggatttttgtcttgggcatatttttctgtatcatttcaagttttatttttgtcttttctacctacttctgtttcttattacagttacacaaaagtgagttctttttatttatttttttaatttatatttttaattttagcttttatcttagatacaggagtacatgtgtaggtttgttacatgggaatattgtgttatgctatagttcagggtatggatcctatcacccaggtagtgagcatagtagccgataggtagtttttcaacccatgcctccctccctcctccttctcatagtccccagtgtccattgttatgtccaggtgtgttcaatgtttagttcccacttataagtgaaacgtgcagtatttcttttttttgttcctgtattaattcatttaggattatggcctctagcttcatccatgttgctgcaaaggacatgatttcattctttcttatggctatgtagtattccatggtgtatatgtaccacattttctttatccagtctactattgatggacacctgagtttattccatgtctttgctattgtgaatagtgtagcgatgaacaggtgagtgcatgtgtctttttggtagaatgatttgttttcctgtgagtatatacccagtaatgggattgttgggttaaatgatagctctgttttaagttctttgagaaatctccagactgctttccacagtggctggactaatttacattcccaccaacagtgtgtaagtgtataagcgtttccttttgtttgcagccttgccacatcttttttttttttttttactttttaataatagccattctgactggtataagatggtatcttattgtggttttgatttgcatttatctgttgattaactggctgtatgcagaagactgaacctggatgcctttcaccctatataaaaaaactaaaaatggaccaaagattaaatgtaaaacctcaaactatcataattctgaaagacaacttaggaaatactctagtcaacattggctctgggaaaaattttttggctaagtccccaaaagcaattgcaacaagaacaaaaataaacaagtgggactgaattaaactactgagcttgcacagcaaaagaaattatcaacagactaaagagacaacctacagaatggcagaggatatttacaaactatgcatttgacaaaggcctaatatccagaatttatagggaatctaacaaatcaagaagcaaaacacaataaaaaaaatttaaaaatgggcaaaggacatgaacaggcacttcacaaaagaatacatgcaagctaccaacaaacctatgaaaaaatgctcagcatcactaaaaatcaattcttaaagcacccttcttataaggaattccaggcagaacgcagagttagtattgcagtttttagttggaaaagctggttaatataacagaagtaataaaccagtcctctatttgtgtttattgacagttgcaatttaattttgacattgaatttatagactatttaatatatttgagtgcacatggactgtagtggaacagtcattcctgaggtggcctgacatctcattgatacctaatacagatgactctgctctaaaagttttattttcctccagaaacattgtacacagtagatgaccatgtccttcaaatactgtggcagctccattagtgttccgagaagattgtgaggtcttatgacctgttgtatttgagtgaagctttggaaaagatgagaattctaccggaaatgcttaaggactaataactgtaatttcctgagttatactagtcaatttgatcaaaattccttttgatctgtgggcaaatggttctataaaattttttactttttgtgcttttcagactcattttgcttcctgttgatttttggctttacaagttagcaattctggttgcaaagtttattattctgaatgctcatcatcaacttgggaacctgcttccaaatacaagtgtaagacagtatcatgcttacaatgtattgatatctgattacatttttggtgaaagggaagatgtggacaaaatggcctcttaaaatggtgacagaattcaaggctcttttctatgaaattgactggaaatattacagataaagatatctttgcttctgattgtgaatgctgtatacaagattcatgatagaatcagttattggaggtagaagaatcttaaatccccattacatgttcttcactagatagaagtcatgttctagaaacaggattttagataatgattacctctggcacatccaatgtatattacgttgtcaacgattgatgttaatgtcgatggctgcttgtaatcaggcagaatgctcagatttgggattgtttcaaaagaactctaattactaaattccattagcagtttgggcagcctgggaaatcaaagtaattgatagcagcttttctgaagatctgtgcagcattagtacgaagaaaacctgttagcttggcaggacagtataaagcttagggaagaatttatagttggtagttaaaagggcctttcagataccaattattttatatactcagtaatctttttggcttttatacactattactgtatgactaaggtggtaaatcaatgtgtgcaccgtaagagtaagaacttgtttgattcgaaaagtatggatcttttatttcagcaaacacctttagcacctacttgtgcagaccatcgtgcacagttgacgcatgtgatgaatcagtcataatcctggcccagtaggattttacactgcagctaggtagtttatccaattggataaagaagtagaatgtaatgaaagtattctgaggaggatagaagcaagcattttattgggaattatatacttcaatttcaattttaattttctgccattttctctgacatgctattcagtcattatacttttaaaacataataattattctagattctgtgacaaaattcagatttaattctaacattgtttaaagcacatgtcccaaattagatatggcttatatgaaatacatcatttttttaaacagctaattgctttctatatcagaaactgttattacaacattttaatgcctgactgcagcattgcgtgtcgtaggctaccagactttaatgaagaattttaaaatgttgactaaaagaaaattattcaatattttggtctgctgaaacttttatcaattaattaacattaatttaaatgtaaagcatcattcctttaaatatatatatgttgtgtattcagtcttctgcaattgactcttttaaaaatacgaacttgttttgtacatagttaaaacaaaaatgtatgaagagaggaataaaatctttggggaaaacatgctacagttaataatatatagcagctgtaaaacctgtgtagtgatttgtaggtaattagcaaaaggactaacagaccatatggtcaagcattatgtattagttatttttccacatgcaaaaataatgttataaaattggactttccttaattaactcagcattgaaacttagatttatgcattctagtctataaataactaaaatataatttgtaagtatctcaacactttgggatattttagattgtggtttaatctatgtatgaaaggcatagcaaaagcattttcttgtatatgaattggggcagtagggaacccctgaaatgtcagattattcatttttcattcattatggatcattatccagattaatgctgaaataattagttttaaattagtctttggtagtgattcccagcatggagttttcacataataaaataattgtaaaatagtacgagacattattttagtacagtttccttatagaaatagggaaccttattaaccttcactgggttaaggttaaactctagtgaggattaatgtaggtaacattactttgaaccatattcctgtatctttggcaaaatgaaaagctattgttcattaaagcattcattagaccttatatataagaatacacttatggttgagctagtgcttgaaaataatgcaatcattccaggttaactttttgttattattcaataattaccatgcactctgaatattttttttcttgtcttatctgccaagaatcactttctcattcaatatgggagctctgccattttcactacttgattcctaatgctgttggaacatatgatttgtctcctatttcacatagagatcttcacttctgagatattccaattttaataaacctttctactccatcatttcctgactatggattagggatactgatacctacttattggtaatatttagctaatttaggaaatgcatctgaaagtgtacagcaaaacatctggtacacattgaatgctcaaaaaagggtggcctcctttcttcatctccgaggttatttctgtcttactttgcctcacaattatagcttctatcattgatttcttaactggatccatctttaggtcatacagttatgtttaagttccctttaccttaattttcaactctaccttaccctcaaccaactgtccttgtttcctctgcgtcttcatcatcaaaactttcagaaacgaccttttttctctgccttatttcccattcctgatttcatgacagtctggcttctaaccccacaaactctcaaattttcctccaatgacttccttattgctacctctaaagactgttatagtccttatgtattttcttctgtcgacctcatgacattgtgtcctactccctgtagcccatgttcattggctctatcactcgagtgataccgagtggtttgatgtctccctttcctctgcttaggtctcttgttttcctgttctttcttttactgctatatcctatacagtggcatcttagactcttgacctggcctcaactacaacctgtcctgtgatgactcttgacatctctcctagtattcaaaactgcccactgatcatctctagttgctccattgttattggttaatatgcccaaacagttccttaagttataaattcttaaaagttattgcagattcttgtgtctctccacctatttgtttcgccacaccattgtgtatggtgataatttcttcacctgcgttcaccctgcctaactgccccattttacccttcatcatctctcacctcagtcattatagttgcttattaactaatctcttggtcaccagtctccctcgcctccaactccagttaccttccttaaataaagaaaaagaaattgatcctaccagtctcctgtttacaagccactgataactcctcattacctataaaataaactccaaagtaggcagcgtagagctcttcacaatctggggaaataatttctatacaaaatcatttcctatgacaaacattgagttgatagtaaatatttttgaataacctcttaaaacatcttccaggtcattgaatgccctctattctgggtgaagccatcacagactgtttcctgaatgtgctttcttttcacctctgcactattatgtatggtagattcttcataaggaaggaccttgcatccttcaagacagagcccaagtatcaagccctcttagaaattgtccatcattttcagggcatagttagttactccctccttgaagttcagtttgagatgataggattatgtggttgcatctcagtctccagcactgcattgaattctgtagaacagagactttgccttgtttatcctgatgttggattccctccaggacatactacgtttaaaacattggtaattatctgctatttgaagcttcttcagcttgttcaaaatttgaatggtcagttactttcaagttttcattttaaaatgaatattttattgaatataatgcagttaaagacatgtgaagggactatattttaatcatcttatgctcagttaaattttttttttttttttggagacagagtctcgctgtgttgtccaggctggagtgcagtggcatgatcttggctcactgcaacctccacctcccgctttcaagcaattctcctgcctcagcctccaaagtagctgggattacaggcgcccactaccaggcccagctatttttttgtatttttagtagagagggcttcaccacgttggccaggctgattttgaactcctgacctcaagtgatccaccctccgcggctttccaaagtgctagattacaggcctgagccaccatacccggcctgagccaccatatccagatagtttttttaaatattataaagtattctgtttctttcatctgtgaaatgtaagagtagtaatttataaatgaaagttcttcctctatgattaattcgagagtcattctcaagggcacagtgtcttcctttgaggggaaaagctttttggaagtgcaagtattatgctgtccctgagaggtcttgtgttttgcaaatatagcacagtcattctctacctttcaaatggaaacattacacaaatgcattagaaaatgtttttgtttaaaacatcacatttgttttgtcatgaaagaacataacagtggtaaattccccatccagcatgcaaaaaccagattaaccccaaatctaccagaaatattgcactaatcaatgattgcacttaacctaagtatcattttgtgaggcaggggaatggttctgatttggttgccagcgatacctattgtatttggcagcatatgtggggattttcctagtctctacccagttgtaaataagtcattcattagtcaagatatgtcgagttagcgtaagtcaaggtctgcctgaactgtgatatattttatctgttaaagaaagcagactgaagtctttcttgcaaattcatgctaatgaagtaactggagtaactttcctagtgctttgtttatttgtcttactttcttcatggggatgtagagatcataatttttcagaaaggaactatgagatgtgtattaattttcaggtttttgcaactagataaattttatataagttttagatatgtttttgcaaacataagtttatatatatatacacacacacacacatatatatacatgatacacacacatacataaatacatatacacacacacatgcaaatggtggtgaagtagtgtggagaaagacaataagggagggagatacagagtagaaaaaaagaggaagggactcatttacaatttgaaatggatggttaagtcttaatgagaaagtgacattgagtaaaccctgaagacacttgccttctcatcttaggttcctgaacatgagcactggctgccatgccgccatgtaaactaaggctagacaagaccaagttcagcatcacccatccccatgttaaagtcactgagtgaaaaggcatgtttggaaatgaaaactgtttataaacctacactagatagacatcagtcctcactttaacgtcatccttcatctggtactaagcattgtatcagtgaggattgtctgagctgcagtgataattgatccaggggcttcaacaacactgatttattcctcgctcagttacacgctcatcgtgagtttgcagtggcacggctgaagttgccctcactccacgacagaagctgatggagctggttctatctggagcacgttcagccttatgacagagagaagagacatcacagtgatttcatctaattccatttcattggccaaagcaagtcacttatgcaagagccttacctgagtgaagaagggaaatagagccttcccagaaggaagggcatagtaggaagtggtagcagatggttgaaacactaattgtattttcctcacttaggtatttaattttatttcccttcaagctccaatatatgttattttccacttcagttacacagatgtcctcttgttaccacatccctgctgtgttctcttcttgaaaatctgtccttgctgggcatggtgtctcacacctgtaatcccagcactttgggaggctaaggcaggaggagcccttgaggccaggagttcaagaggagaccctgtctctacaaaaaaccgaacaaacaaaaatgtttgtgttttctctaccgctggtgtgttagctgtcttcctcctatagattgtttgaatcccaagagtcttttaagatgcagctaagtaacatttttccttttcctttacagttaatctgcttaaatacttcaagctgtacaagtctgctgtggaagtgagcaccacacaatgtggcttcagcttccgatgtgatttctatttgaactccgatattagaaaccatgtcttagacctcccatgcagctctcaaagtgctttgcattgctgtggttacatggaaatgttaaacaaatgagttaatggaataatttttatttaattgtttttaataaatattcatgaaaaatgtatctatacttgtaaattttaaatatgagacacagattgttctcctcacgtaacagaagagtagatttcagtttttggtttttgtttttttttttttgtggagacagagtctcactctgttgcccaggctggagtgcagtggcatgatcccagctcactgcaacctccgcctcctgggttcaagcgattctcctgcctcagcctcccgagtagctgggactacagggatgcggcaccatgcccagttaattttgtatatttagtagagacagggtttcaccatgttagccaggctgatctcgacctcccgacctcaggtgatccgcccacctcggcctcccaaagtgctgggattacaggtgtgagacaccatgcctggcagatttcagttttgtttgagaaaaacggtgtctttgtggtatctcaggaccctgaatgaagctaggctgtgaagcatctctgcccccaccttcagccttctcaagcaaaacaactgtacttcagtttttttatatatgtgtaggtatgtgggtttctataagcttttatttgataattaggttattctaccaaaatttttaaaatcactgttttaaaataaaaatagagagggccttactagatgtacattttatatgacagttcttttgactgccatgacctgttggacaacagccttaagatttaagacaaatgaagcaggagataggttgtgttttaaaattagcttgatctttgaagctgagggctacttttcttcggccagtctctagctttggtgaactctccttgggaaaatgatttatctctattctcattggaaaataaccttattttattttaatatactgctgtccttttgggcctatgttgctttcataagtttggaaataaaacgaaatattatttagtgtcagaaagctcaaacgaactttaaattctggagcgtttaatgtagcaatgtgtgcagataatagcaacattcatctaagtgatcactgatttcagaaatcctttaaaaagtgtcatcaattctctgaaattaagaaaaaaagccaatttttaaaataagatctctatattggaaactttattcttcacacataaattattccctacatgaatcattctcaaaatgtattctctcaaaaataaaaccgagtgaattctgttatcagcatgaggcatttatgacccgaagaagctaacgaacaagatccaaaaaaaagaggttgaggctgaagcctaatgactgggtttccagtttaagtcagcaggttcaacacactagcttaattctcttttctcatatggtagcattaaaacaatggaaaaggttttttttgtttgtttttgttttctgttttgttttgtttctctgaagtgaaatcctacattgagcattggggaaaagtgggaaaggtgttcaggagggcggttcataaagcatttcacgtgtaaaaaagggaggttcataaagcatttcacgtgtaaaataaaacttgtctgtcttggcaggcatgggtgtcaccagcctgcctgcctgcttttccgctcatgaaacccacagaatgttctgagtgttgacatgtctttcattccaggaagaagccttttgggatcatgtatttcacagtgcagatgaaacaatatgaattacccatacaaatcaatgtcatttttcacttagaaaagtaactaggattatcagatccaagaatcatcaatcagatatttagggaaaaactgtatttagaagaatgaaaagggcaaccgataccagaagattcatgtacaattcagggattaccagaaacttttaaaaaggtgtctaattaataccctcagcagaatttgagaggaaggccaggcacggtggctcacccctataatcctagcactttgaaaggccaaggtgggcagatgacctgaggcgaggtgttggagaccaacctggccaacattgcaaaaccccgtctctactaaaaatgcaaaaattcgcctggggagcagagcgagactctgctaccaaaaaaaaacaaaacaaaaaaaaaaacagaatttgaaaggaaataatagctgtaaaggctgttatgaaaaaggaacaatcaaaacaagaaatttccaggaaattaaaagtatgattatcacagtaaaaatgtattaaaccaaataatggaaagggaactgttgatgcctaaacatgtttttttcttcaacttaaagtgaagattaggctgggtgcggtggctcaagcctgtaatcccagcactttgtgaggctgaggagggcgaatcacttgaggttaggagttcaagacaagcctggccaacatggtgaagccccgtctctactaaaaaatacaattagctaggcgtggtggcatatacctgtagtcccagctccttggaaggctgagacaggagaatcaattgaacccggagatggaggctgcagtaagccgagatggtgccactgccctccagcctgggccacagagcaagactctgtctcagtaaataaaaaataaataaataaattgaagattaactctgaacacttaaaacagaaagataaggaaatggaacattaaagagttaggggcaatagtgaatagagtcagtaggtccaacatctgattaatacaaaataataagacaatgaaaggcagaaaataaagtttcatgacaacattttataagctcaagaaatagtctatgtcaattaacatttgttatgtaacacatgacttcaaaacttagtgatttaaaacaaagaccattcatttagcttgtgtctgattcggctggttgattcttctgatgtgggcagtgtggctgtttccacctgaactgactcatgtttctctggtcagtggaagattggctgggattagctcatagaaggtgaactcacatgccgttatctgtgatctttgtggtgatgggaggagctgagccatgtgtctttcatcaccctgctaacctcgacttgttctcttggcagcaggattcctaagagcagcaggagtgcaatttccaaggcaggggcattttcaagtcgctacttactttcctttagtactgtcccatgggccaaagcaaattatgtggccaaacccagagaacccgggaagggctcttccaaagctaggcacaaattggggccattgctgctctcaatttaccataggcatcaatagacagatgtaaaagtctggcaagcgggctggatcaaagctggatatgtggagatatcttgatgaaatttcaaaataaagaagatgccacaagcttccaatgagactaaaatagattgtctgcaaaggaatgaaaaccaggctaacattatgttttccatcaacaacactggatccgagaagctatcaaagcagtgtcttcaaagacctgagagaaaattaatttaaatatagaattctattcccaacttttaatcatacacaccggaaatacaaagattggtaaaaaatatatatctgggcacagtggctcatgcctgtcatcccaacactttggaaggctaaggcaggaggattgcttaatgccaggagttggaggccagcctgaacaacatagaaagaccccatctttattaaaaattaaaaagaatatctatatgcaaatgtgttgggtgttaacccaaaaaaaatgagtaaaaggatgatatacaggagaagtgatagctgaatataaattaaagggaaaactgaaactaaatggagaactaaaagggaataaaaagataatacatgaaggcctgaaactttcaaaactctttcttatgcagcagcacattagtgttggatgaaaatcccttccctaaggatctaattacactactacattttgcaatgaatagtattcagtagtcataatgctagaaatgttgcttatgttgagttttaatttttagaatcaaattttacacaaagcattggagactaaattattctcttgatgttagaaaaaaaataatgtaattaacaataaccagaaggtggcagaacacggaaaaagtggaatcaagtgtctacgcagcagttcctcattttcactgaaaaagatgttgacttaaggttgataagtcaacaagacagcttaaatatatattacttgaagttataaatgataacctgttgaggagataaaagtaaaatacaaatgccagaagtcaggaggtagaataggaaagaaggagggaatgggtataacatccctcaattctttatcttccatagaagacaagcagaatgcacgtgcaaagcagttaagaaataatatgtatttgatatattttggtatgtctaatatgtatttaagcatatcagattgcaatgtcatgtatgttaatgcatgtgcaaatattacctttctgtttataaaaaatattgtgagagagaagataccctcattaactaataaagtgcattgtagaatatgtataaaatggaaactgtccattcgtcagaatgaatgaggcctttatcaaagatgtccatcatacattgcttagtgaaaaaagcagcagaacagtaagaatagaagtatgatttattcaacatgcttcagtcggcctgcttgcctatctgcggtagtgtgtgtgtgtgtgtgtgtgtgagtggaaaaagtgaaaggatagataccaacacttctgtattattactttttatacaactgttatatttgtaagtaaaatattctaagaacacaaaaatgtccagattcagtcaggttcatttcccgtgcaatctggtagtggcaccaatacgcatgtgttaaagtcataattttcctttttaatgcgaatcattagttaagaggctgtctacatattttccatttaaaccagctctttggagaatgagatccccatgctattgtacactagctaaagtagtaaacgcatagttttccagcactttgggaggccgaggcgggcggattgcgaggtcaagagatggagaccgtcctagccaacatggtgaaaccccatctctactaaaaaaaaaaattaaaaattagccgggtgtggtggtgcatgcctgtagtcccagctactcgggaggccgaggcaggagaatcgcttgaacctgggaggcagaggttgcagtgagcagagatctcaccactgcactccagcctggcgacagagagagactccatctcaaaaaaaaaaaaaaaaaggaaaaatactggattagatatgtttaaggttcattttgcttgaggcactatttcaagagtctaaaagagtttcaccttcattttgaagtttgttttgtaaagttattatagtcatttatgtggcagtaaatcaatccttattggtatactaaaatctaggtattatagatgctagtgtcactatgcagagaatcctgtactttttaagaagttggagtcatccagctgttccttactctgatgccctgagagagtatggctctcttactgcgaatgcatttcggacacaatgtgttgctcgagtattggtttttctctacacatgtaatatccccaaagcctaaaacaagatgtttatctttttgatagacaagcaattaacttttgggggggagtttcaaggcagtaaagcccatctgttaggacactggaaataaataggaatttctgacagaagaacattatggcctttcatttgttatgctgtagctaaagctctgtcagcatttttattataaacctaggggattatcagtctgcagtaaaactctttttggactgaggcttatttagattcagagcgtactcacgaagaaaacctttactttcctgaacacgggatagatttgtttctgcttgcctttctaaaggagaaatgtgtctgggatttccatataattgtataaatttataaaatatttgatttattataaacagagtcattggtgatcacagtacattatttcctataaaggcagtgtagaaactggttggcagcatagttaccaagtagcgcttaaaatagttgtttatttctaagtcatacagtagtaggattttggcagttgccagatagctcaccattatccatgcattgataagattgaatacacacttcataagaccctttccttaaaatattgaaatttgagtggctgatcctgaatatcattcctattctgaaatgtgctccaaacagttttaaaaaatgacttcagtttcagacagaaagaggcatgtaatagtaatttatttttattcacatgaaagtataaagacactaaagaaagaataatgtttaacactaacagcatgggtttaaaccctcagtctaccacttatcagctgccgtcctgggaaaattccttcaaatctctgcacctcaggttcctagggaagaataaatactgataatgattattcttgtgttactggggctgctctgagttttaaatgcactaatacattgaaaccccttaggaaagtgcctgaatatagtaagtgctcaataaactttaagtagtattagtactcctggtagtactattacttgttagttattactatggttttatatttcatcataggaccataacaaaaaaaaattatttttcagataaaaattatactaagtgaaataagtcaggcacagaaagacagataactgcataatttcacttgtatgtggaatctaaaaatgctgaaatcatagaagcagaggctggagtggaaggaaatagggagatgttggtcaaagggtacaaagttctagctagctagacagaaggaataattgcatgggatgctgatcatagttaataatgtattatatggccaggcatggtgactcatgcctgtaatcccagcactgtgggaggccaaagcaggcagatcacttgaggtcgggagttcaagaccagcctggccaacatggtgaaaccctgtctctaccaaaaatacaaaaattagccaggtgtgctggcaggtgcctgtaatcccagctacttgggcggctgaggtgggagaatagcttgaacctgggaagtgtttgttgcagtgagcccagatcacaccactgcacttcaggctgggtgacagagtgtgactccgtctcaaaaaataatattaatcataatgtattatatatttctaaactgctaaaagaatagattttaaatattctcacaacaaaaaatggtaagtagggtgaggtgatgcatatgctaattagcttgatttaatctttctacaatgtatacatatatcaaaatatcacattgtacccataattatgtacaattattatcaattaaaaattttaagatctaacttaaaatgccatgacattaaataataatttttaagaaatcattcttactgcttaacaatgcaagtgttacctgatcactgcagttgatcaatttcagaaaacatgtaatatttattcctgtggaataaatactttgtttttaagtgtgagaattctgtcttcctaggagcttcatttaaaagtcttattcctgctgatgttgctgactttaaaagagcatttctcgattatattgcgaagtatagcaaaggaaaagtactgttacataatgtatatgtcaagatgtatcagaatagtgttatattatgtaaggctttctcctgcttcaattcagaggagtagcaattttgtgctgtacaaataaattgattgatagaagatagcaagaaaaagccataccattgctcagatatgcttggctatataccatttcacctttataatacaagaaggatacagtttcagtgtaaaaactgtgtagtgagttatattacgggggggtatcattgtatagagtgtcatgcaacaattatatgcttaccactggaaggcagtgtaagttttattctttttataaataatatttatggcatttaatggggtaattacagtgatagcaacggggtggggcagaagttgtgcacattgctaagtctatttattcagcaaggattgattgacttaatattgtgtgccaaggtgtgttagatgctagagatagaaataagaataaagtaggcaagctcccttgtccccagcgggcttactatcaagcaaataaatactctaccatgaactactatgggataatgcacaaagtcttcagaaggcagtggggtcaggggtagtgtccagaggatatgggtaaatgggccttaaataaaagagggaaaccctattctgtctcttaaatgaaggagagaaggatacatttggataccctaatatttataggtttaagagccatgagttaggaggttcctgggtgacagctcatggttttgaatatacgggtatagaattgttttacttccaaattggcaataatacataatgtttatgagagcatcttcttggtttaggactaaagaatgattaccttggttaaatattaatttatatactctgccaatgtggataacaggtgatcagtaagtccttctgaatgagtgactgaaagagtgtgtgagtgaatgaacaaaactttttacccacatgtcccctgacaagtagggttttgcaagtcgttcttcgtccctctcttctatcctgtcctgattttacactgtatttttcagttcctgtaaagcagatctcaatgctggcacatttgataattaattaatggtggaataagaggaggtgttagctattaatactgtcctttacagatggcacatgcaattaaacatcagttttagggaaacaaaactctaacccgaagaagagttgctaggagacttttgaccttgctggggtggcatgtgcattgcatcagagaccttctgtgctccttccagtcactctgcatctgtgagtgcctgccaagggtgtacataggtctgtgtgcaggtctaaaaaaaaaatccatctcatggaaattgaggaagttaaatttgagatggtatcttgaactacatagcaggtatactgctgagtatatagctgaaattttgggtgaatgtgaaatgtaccagtataacatttataatattatgtggcaactgtaacttgtcagagaagcactagtgaacattatcaaaaaaaataagccaaaacatagaactgactcaccaaaaattgttaattgtatgcttaggttgcgtaattttctaagtcacatgttggtgggaaattttttttgatatgggctgacaaagcacaataaacttggagacaaaataaattgtactattgctacttaaggtatgtgctcatattttgcaataagcacatttttattgtttttaatcctctcattaagacataatgatcttcttccagctgaggtgtctaattactgtcatatccaatcacctgttaattggtgagaataaagcaaaaagccaccatggacacatcttgactgtgtgttctattctcaatgcatagaaatggattagacatagagtaattgttatttacagtgtggagcattgcctataatctttgcttttcaaaatataaacagtagcaaaaccaactaaactgtgtatatggctctttctatgctagttatctttcagtttcttttttaaaaaaatacagacttgagttttcatcaattagagttcacaaatctggaaaatagataagttgtttttgtagattcaaaacttcataggcaaagctcagatacgtgttgtggcctagtagagtctagtgcctaaccttcctttcccttcgtgaacatttatttgatttagaccacagggcatccttaaaaatatttttatgttttaaaaattcatgtacatatttgacatttatatatttgaggtgtaatgcaaatttaaaggcacacattaaatatattcagggttctagagcttttgaaatttgatgcacaaatatattgaagtgtatgtataagttaacatatataaattattttacaagggcaatgaaaatattttttagagagacactaaaatggcatgtaaagcagacaatgtggccctttgcctgattttgcacttacaggtttatggcacaaaacttccccctcatgacttacccttctcatttatgccattgccaccgccatctcctgagtccctagaggcactcaggtaactcacctagtaactaactgggtgatttaattaattaaaaagttcagatatctcttacatgtttaggaggtgttagtttatgattaaaatattactataggagaagacaaaagtaatattgtcagaatcatttgactcctacaaatacagtatttataaatgcaagaaataatttacagaatacataatcagaattcttaaataattgtcatttattccactagtcctgctaacctcaggacttttctcttctttttgtttcttcatattagctgtatatttcctggaaccctctcagtgattgcaacagtacctgttcttttaagatcttgacctttttggtagtgactcttcaagctaagcaatacacatttatttctgagataatgactgtattagttatatggtgtttttatttttgttactcctatttcttaaatcttcatgcttggtcatcttgcgtttcagtctgtaaggcattttatcagccattctgtttacaatggatacctactcaggaaggatgactttcaaaatttgtgtatattttttcatttttttcttaggggagttctctttatgtacattgaaaaactaaaggattgtaattgttggtgaagaggtagaagcatttgctgcaaaatgagttatttatcttcaagcttacagtaaactgcaatgagagttcagctgtcttggttatactctacaggcagctcaccgttaaacaactgcacctgtggctgcctgtaaagtgacgtagtgagtttgaaacacaacagaggcatttttctagaattattacaaatctatggtttgtcaacaagataatatgagtcaaactgattgtaatacaggattgaaatttatctcattgggtattacacaaattcccttaaattaaaaaatcaagacttattctctattccctaaaaaacaggtttactttggttggttggttaaagctgctgttattcattctctctcttaatttaatgtcagtgcttctaagtgcaaggaatatcttatcatcatggctgaaccttgagttttggagttggatatcctgcagctttagtccaaatgctacaaactgagagaccatggggaagttattttatatttctaaattgcattttattaatctgtaaagtggaaataataatgatagtatctccctcataggcaacatgtcaggattaattggtatgtcttgttggtattaattttagtcttttaaaccaatatttgatagtaacaaaatttcagggttagtggaaattttaaacattttacttccaaggggttataggttggtgggaagagactagttgcaaacctacaattgaatgatccagtagtataaaaatgtgtgagcagcaaggtgccctctgtgggccagaagcaggtgcagcctctctcctggaagctgcaccctccctagggagctccaggagcacgatttttcaccacttagggctgcgtctggaaagcgtaactctggggacactgtaaccattttatgccttgtcctttcatcatcatcctggaagaacttatgctgttgatgtgtatgcttcagtttaaggcaacgttttggtttggttttgttttttgctgtttttttttttttttttttttgagatggagtttcactcttgttgctcaggctggagtgcaatggcgcgatctcggctcactgcatctggtccctaggaccaaacagagcctcagcaagtcagcatcttaacttgtcgagagaaatctggttcaataccgcgatgtctctgcccctggtttccactgcgctagaaagctattttccccagtgttaacatgtctaaaccttcgtccggcctgatcccttccaagatgaggaacctcaacattccatcctaggacagccctgactagatggtcttttgaattgaaatttgttttcccgtggcttccacactttggtcctggttctattatggaggttctgtttaagttctattattataaataatttgtatcatttcttttttttttttttttttttttgagatggagtctcactctgtctccgaggctggagtgcagtggcgcgatctcagctcactgcaagctccgcctcccgggttcacgccattctcctgcctcagcctcccgagtagctgggactacaggcgcccgccaccacgcccagctaatttttttttttttcgtatttttagtagagacggggtttcaccgtgttagccaggatggtctcgatctcctgaccttatgatacgcccgccttggcctcccaaagtgctgggattacaggcgtgagccaccacgccccgctgtatcatttctttatatacactccttcaagtatttgaagattttcacactcttgtcataactaagtatctttttctgcacatttagatttattaatcgcttcacttgtacaacaaacatttaccttgagtctactgcatacttggtattgatgacaaaactaagatgtggtcagtccctgacctcaggaaacttctcaagtggaactggacctttctcagtgtgacacacacctcacatgaaattattttaacaatccaccatcatcctggcacttttcttgtaaatgtccctcagtgtgtgtgtccttcttgaaatacaatgcccttgtactggaggtgtgatgtgatagtgtagggtaggttagcggctccttccttctgagtgtaatgcacccttgatacacctgtgataatatttactctgtgaatggttataagctgttgatttgtatggaagctgttgtcagttaataccaaatctccttagttctgctagttgtatgttgtttttcgaaactctagcacagttacttctattaaacttcagcttaataagatcagcacattgtagcaatctgaattttgtattcttattctatcatccaaatatttgaaaagcaataagctactttaatttatccattcattgatatacattgaagagaacaaggctcgagaaacccctgtagcaaaagcagagccctcccttaatatttctttctttattaattctatatatggtactagcagtctttaatatttatttacttaagcaattgtatagttcctttgccaatagatattacaaaaggattcaacacattatttctccagtgaggcctattcttcacaatcagttctgatatacaaaaaataaaatctatttcttagggaaataaatctaaagataattatgattctcctgtatgctaagtatatatttctactcattatacttatgtaggatgcatgtgatattgttacaactttattctaattgcatatttttgtcattgaacctatgtacatatcatgatttttaaaaaatgttaccttagtcaaaatttatcataaaatctcgaatgaattaaggattcctgctatagagatgtaaatgggagcaatttgaatatagccccttgttcttttagaaataaaaatgctaacatgaaatattgctaatctagatagcaatataatctgttttgaaaatttactattattttgctgttactggttacatcttcttgtaaattgagagaaagctttttgtgagggcatcaaatgccttaggatacttttcactttgcaaacccatcttactttgttgctatggttactattataccacaagaaatccttcatttgtgtataaatggttttatagtttaacgttacttgttaatattatacaatatgtgagcctggtgaggaatcgtagcaggacatggttgcttccatgttggaatagtgacctctaacagcgtagcagcacattcgttataaacttattagcgagtaagatttctagagctatttttacaaataaaatcctgcttaggacagaaccatagcatgtggtgaagagcctagattttggaggcagtcctcctgaggtctgatcctgcctctaccactaaccaactgtgtgaccttggatgatttacataccctctctgggtctcagttttgtcgtcactaaatggggacaacagtgcttagcacacagggttgttgtgaagaagggttgagttcatatttgcagagcatttataacagtacctgacagagtacatgctatgtaaatatgagctttgttgttgttgtaagagcgttctttctcttacatttcatccatctcaaatgatttcaaaacatacatgaaatggtaagaattttcaaagtatcactatggaaaatgcaatttaaattacttttgttccaaaacgtatccatgtaattaatgtataatcgccctaatgttgttttttacttaatgtctgtgttatgcgtttaagaacgcttagttgtgatatgtcacagctgcctaccatttattctgtcttagggtattgccagaatcactggtactaacctagtgaaatagattacacaaagataaataagatttctgtggcaataaaatcattgtagagcattagttttattttgtttaatgtattttatgtgttttaaatatagtagtcaattttcataaagaataatgtaaatttaaaaataagaatttaaatatccaaagtttgtgttgaagcttggctaaaatgttgattttgatcctacaataatgagagattacctaaaaaggcagtttgaggccaatgcacagtcaatttgatatcagtgttagtgatatttgactttcaggacaatgaagaatcataactataggagtaaatttagcatcgtaagtaaaataaactctttttaccttttaaaagccacaaactcctcttctgattataaactatatgaagttgctattcttttctgtttaatttctaatttataaaaatatttttgagtcaaatgtccagtttaattcccactttcgtgggttacttcttcaggtctgcagtgaatcagtctaaggcgaggtcaggaagagatggaatatcagaaacctttgtggtctgggtaccaaaagacttgagctcaagttagtcctgcccctttcctaaatgcatgaccctgagaaggtcagttaagctccctgggcctgcactttatcttctgtacatgaaaggggtttgatgaggttgcctttatgtttctttctagcttctttttctcttctatctggaagttggtcctctttgtgaagaagctgagatggtggtgcagaaccagtgcttgctgccagcacactgtctcttctcaggaagagagcctcactggcagagaggcgaggcctttgctcatccactcccaggaaacgtggagactttctcccctgtgctactgacccatgccccagtagataccctcctgtcccatgccccagtagataccctcctgtcccttcagtcctaaagggctgtgtactctcttctgaccacccacacatgttttgcatgatttttctactgagacttccactccataaccagcatgcctccctatgttcttaacttcctctcttattcttagctggatcctggctcacatctgaggtttcccatttcctggaagtgtcccttcaagtcatgaatgtttacattctcatccaactaacccagggccaagaattgggattggtgacatttttactctgaatttctgcttcttgactatttgtcctttaaccttttgcaaaacatgatcatttgaggtttatgtcattcaagttttagtctcctgtgtcatcaccacattctttcttgctcacagaagagttgacaccttgtttgtaatctctgtctatactcgaacctctcccattatcctgggagatttagcatccgacaccttgacctcccatcttctcactgcttcctttcctgtccttgagccacagggtcctacattaacgtcctgactttgtcggtatattcacctgttccagtgaacatactccagcttacgctttcaacccctgtcactgggactgttttgggactacattaggacctccagtctattgactcctgtattttctcccgatacgtcagtcttccctttttcttttctccacctgactccctggtccataacttcaataacaccattgtttatgctctgtgttagagtaggcctagaatctacctttgcttttcaatctttgcattgctgtcttctgtaaaaacacaaaacttggaagaacccaactatttggcctttcaacctgtgcagccacaagatgttggagaaagacgcccaagaggacaaattggctctatgttaatgtttgaacaccagcttcaaatgagctctcagcactgcttgtcccatctcttgctaggcatctctgatcagcttttcttcccagtcttcacaacaacagtttcatacctcttcccttctcttttccagactcctgctcagtcttggcagatgaactcttctcctactttacatgggaaatgaaaagtaacatatggaaactccctcatcttcctgataccaagcaaataaacctacctaaacccatccaagcttccttgcatcctaaggcaaatctcccactggtgctttgctttgtatcccatcacttctagtttattaagaaagttaactctattgattatcctcccttttcttttatattcagcctcatcttatcagtgggatgttttccatgtgtttttaaacagacccaggtttcccccattaaaaaaaaaaactcatttaatttctctctctctttggaaacaaccctgactctcttcccaccttggcagtaacacctctggaatgggtaaagttgtgcttctggtctcacttgctttgtctccacctaatattagtatgttgtctaacctcttatctccacagtattcacttctaccaagtttaccagtgccacctgagcaacatccagcaccagcatcatccttcttcaggctttggtgacacaagctcttctacttttctggccatgtgttttcctgtcttttttggaagctcactagatggtctctcaccaatgtcatttatgtccatggcattcataactagcagtatccaaatgattcatgaatcaatctctagtctagacccagagatctctttgtgtctgtgacttctacatttggatgtctcaaaaggcacctcaaaccccacccgtgtaaaattaaaatcaggatctcttctcccacccacccactcccaagctgggtcttcttccagtgtttttgtttcaataaataaccgggctgggcaccatggctcacacctataatctcagcactttggtaggccagggtaggtgaatcacttgaggccaggagtttgagaccagcctggcctatatggtgaaaacctggctctactaaaaatacaaaaaatagccagccgtgatgacatatgcaatcccagctacttgggaggctgaggcaggagaatcacttgaacccaggaggcagaggttgcagtgaagcaaggttgcaccactgcaccccagccttggtgacagagtgagactgtctcaaaaaataataaataactatactgctcaactgttcacctgggaatctgccttgcaacttctctcttcctcatgtcaatatcaaatctatcaccaagtcctgtcagtttttcctcccatctgtgactctccatcttccccatcactatccctagtccaatcaatcatcttttcttgactgaactacagacagtccctggcttttacaatggtttgacttaacaagtttatgacctctcaatggtgtgaaagcaatacactttcagttcaaacgttacttcaagtacccatacagccatcctgtttttcactttcaatatcgtattcaataaattacataagatattcaatactttattataagataggatttgtgtgagataattttgaccaactgtgggctataatctaagcgctctaagcatgtttaaggtaggctgtgctaagctataatattttgtaagttatgtgtattaaattcactttcaacttagggtattttaaatttgtttattgggtttattgggatgtaaccctatcataggttaaggagcatctgtaattcagtgagaggcaaaagatgatagagtggttaatctacgaatttgtttgttcacatctattttgcttcttcttcaaacattctgttcattgtaggcacattgatctttttaaatgcaaatctaatcttggatgaaaggttttgctgtatggccttggaatctaagattaacaataaactttgaatctctgcatttgaattcagtggcattttggttacataaaatttttgtcactgaatatagtcaaattttatgagaaaatacatattagtctaaatagttggcttaaatatgaatacttaaaatagaagccattggcaaatttttgtctacttttatttctggcttaaggaacttaaaatttgtacactagacattgtaaaatgtttgtacaaggccacgtgatatgaatatatcattttgacatatttgttttctttttagctgtttatttgctgtttgggtataataaatcattaccctagtacttcacatatatgtctatataagtatacaggtaaacatttcttgctaaaagagctcttacactgtttctttaacttttacctgtggtaattggtttcttaatgaattatatcaacctattaaaaatcacttacacagttgtctttagtattttgagttcttagggtgttttgaattactgaatagacagactagaattttagttttaaattaatttatttaaattataccaaggaattgataccctgggttttctgggtttattttacctagttgatattgataaaatttcactgctattggactctgtggttaaaataactcttaggcaagtaacattgtcggtaatttgaataaattttctcttgggttttggggtaagggaattaatatgggaatcaatgtgggagaccaaaaatatattgagaagtaggatgaaagtagttagttaatcttctctattcttactggagctttccatttagtctatattttagccttcatattcagggttagaaaatttaactgaaaaaatcatctatacctggtctattatattaagctagaagtaaaggattctctatcacctataaaaggataatgaaaagatcacttttggcaagtgatatatactttatgattagaaatacatgcaagtaattttggagtatgaatcctcattttgcatatattctaacaaaaaaatagaaatctatgtggaaaatgacttaattttaagtaaaaggccaggttattgcatttatgtgaaatgaagtgaagtgctgcctgggtgaactgagcataacatgagtgtgaaaggacatatttcctaaccagttgcacttttgctggaggctgataaatagtggggtttcaaatcaatttcaccattgatctgaaagataatcctttttgtgacaatcttgtcctggggttttactgtcagaggtgaaaatgaatggcagggtctaagttaaaaaaaaaaaaaaaaaggagagagaaagaaacagggcctgtggggaaaaggctattgtttgtctgtcacacacgagctgacacaccagagacttcatatgtaggggatgagtgtgggggaaaaacatggacccagaaaagattttattttgttaatttctagaaatatgctctaaaatttatgaatcaatcaggtttcttattacatgtgggaacatatatggtagatgataatttggctggctttacgaagagtctgcagtgcttttccaatcaatattctgtgcttcatgctgtcttagccctggaaggcaaactgagtgggggaagctacaggggaaagcaaggtatttgacttggatggttttcattcagcacaggctgcgaaacaaataaggattaccacaggtgcctcagagaatacccaaggggatcagtgctgagaccctttaaaacggtgctcagtgattctttttgaggtggaaattaagatagatttgccatttcttgccctgatttatgaaagcaggtacttgccatgtacaaggagtacatgaagctttactgttaagagaggaaaggttgctgtggtcagacaggtgcaattgctgcggtgcagtgtggtcctcaggtcgaactcacacacctgtctctgcattcaagtcaggcaacagagggaggtgttgacttggttaataactctgctgaaaagtgttcgtgagcctctgcttggtatccatcctcgcagtgttaaggatctgaacttcttttaaatgcctcatgaaactcctctgaaatatctgtcctctaaaatctgagtctgttggtggggtctggcagatctcccttaaatggttttctaacagtttaatcagcttccgcaggatccctttcagaaatgtgacagcccttcccatctgtggatggcacgtgcgggtggtttccagcgtgctctactctctcaagcagctcatgaattttatacatctcagtaaaaagaagatatgggaagttgctttggggaatttaaaacttttcttttgcaatttcaatgtttgatcattgttattcgtttcagtaaatttagaaaacaggatactttagatgttatttttcagcatcgcttagagcagggacctgcatgtgttttggtaagggatacgtggtaaatattttcagctttgggggccgtaaggttctttgtcccatctactcaggtcagatgctctcatgcaaaggcagtcaaagacaacatgtaaatgaacgggtgggactgggttccagcacagctctacagaaaccaatagcaggctgcatctggtttgtaggctgtagtttgccaacctctggcttaggggaaaagctgaagagaaagcgagtatgtatttcctcaacttttttggtagttaaggcctgaggactatggctccagctgatgtcatttagtagcaaaatatgtaggaattcgcagactgttgttttttagttgttacctgccacttttagaggtatctctgcaaccttaataattcacaactgagaaatctgtcactcaacagtaatatactcagatagggaactcttccctgagttatacacaattcattcataagaaacaccccacgaaccaaaagaaaaaatcctttgttttgtgtgaaaactaaaagttggcataatagcaatgcatcctggagcttctggggtttgggagttggaccaaccctgtgcggtccttgtgatgggtaatgtcagccaagaaccccaggcggagaggatgtgacacacttagtatggttgccgtcctgcagcctcttactttctgcatcgccaagccaagaacaccaatttagctgcgaactttgttcccccattgctttctaaaaggccactctctgcttttgagacccattggtgctttgaggcttatattttaattttgaaaagagcttacctgattttcttatgattaaatacattttagtttgtttgcatgtgaaaatgttgtagaagacaggtaaaggaatagacatgggttttcactttctagcccacttctatgatagctcaggaccaacaacttctctaacccagatacctacaatggactcttaatgtgtctttgtgtctttttgttcctgctttgtcccacaccgctctgtgtccccactgcagtgagaatgatgattccaaatcacacatttgggctgccccaactcctcagtggctctttggagccttcacaacaaactcttaattctccaaaaccacatgcaagacacagtgttctggcttcacccacctctgtggcctcccctcattaccctcaccttcaatgctgctctccactcctactgacttgatgcctccccttgcttcccagcttttaattcatgacactctgtttgcctgaaacattctgccttgtccatcccacaacccttacctgccttctcttctctcttctctccctctcaacgccacctcatctggctaaagcctttaggacccagggtgctcccagaggttgtttctccctggattcttttctgactctttgggactacgcggaggtgctctctcctgcacgctccctgggcaccatgcggggatacccgtcctagcatttatgacatggggatgtatgtgactgcctgctgtattagctgtaccacaccctctgctcttcaactacggagtgaatagtttgtgtgttcctgtactcccaatccttggcacaaaatagatgtttgataaatatttgttgaataaatgagtcttcaggtgagaaaacacatgatagattggaacactgccttgtcaaaacttgcagtttgttaaagatacgataaattcataaatgacactgatggaatcacaattcttccctgaaaatctgataaatatgcaatatgtatagtaaaatctaggggtgtcttattaatattttctgagcattcaccctttaaatatactcctcatatataaaaatgtactcctcatatataaaaatgtactcctcatatataaaaatgtactgctcatatatgaaaagtacaattgttttttatataagatcctagctatacttcagaaaacattttaaattcattgtcttatgagagaaagttgggaagagggttcgaggaaagggaaacatggcccctctctaacctaaaagaaacgaaaacatatgtccacggaagtacttgtgcaagactgcccatcagcagcaagatagaggaacgaactaattatacacacaacaatggatgaacctcagaaatcatcatgcggagtaagagaagccttaaacaaatattacatactttatacttttatacatatgaatttctaaaacaaaacccatttaccgtggtttgaatgtgtcccccaaaagttcatgttttggaaaccaaatccccaaattcatatattgactgtaggtgggacctttgggagggtaattaggattagataaggtcatcggggtggggccactatgatgggactggcggctttagaagaagagaggcccaagctgacgcgcatgcttttgccctcttgacatgtgtgcccttcaccatcttatgatgcagcaaaaaggccctcaccaggtgccgttgccttgttcttggacttctcagcttctagaactgggatcccaataaacttctgtaatttataatttacccagtctgcggtattgtgttatggcaacagaaaatgtactaagatactagctatgttatccattcttacgctactataaagaaatgtctgatactgggtaatttataaagaaaagaagtttaattggcttatggttctgcaagttgtacaggaagcatagaggcttctctttcttgggaggcctcaggaaacttacaattatggtggaaggcgaaggggaagcaggtgcatcttaaatggccatagcaggaggaagagtgagaagggggaggggctacacacttttaaacaatgagatctcacgataactcactcactgtcatgagaacaacactgagaggatggtgctaaaccattagaaactgcccccatgatctatgcacctcccatctggccccacttccaaaattggggattacatttcaacatgagatttgggtgatccaaatcacacggatccaaaccacatcaccatctgtgattaaaataaatcagaacagcgttttggggtatgggatctgacttagtactcttacgtatacacttaagagatgtaagtgtgtatgtccacaaaaagacttgtacaaaaatgttcacatcttctttattcataatagccccaaattggaaacatctcatatgtccattaacaaaagaaagaataaacaatttgtggcacaatcaaatcatgggttattagtctgtaattaaaaaataaactactgatatgtacaataatatggttgaactcaaaaccctatgctggttgaaaggaactgaacacgagtataccacgtgatggcatgaagttaaggaataggccacaccacgttttggtgatagaagtcaggaaaggggttactgctgagagttagggaacgctgttactggaaagaggcacaaggaagctattggggtgatgaaagcattcatcttgatctgtgttgggatgagatgggtatataaatgtataaaagattattaggctgaacacttaggaattgtacattttgctgtacataaatgaaacatcaattaaaaatagattttaaaaattggttgttacctggcctggtatttggatacatggtttcttcaaggatgaatttattaactgaattaataattttaggactcttaggatttccacctttagaaactagtgaagtatatgctttgtaaatattctagaagacttttcatcatttctgttttgttgttactattgttgttgatggttgaaattaggcatcaagcataaaacagtgagcgtgaattctgcttcatatttacgctgacagagttctgcccatattctgattgacatcttcgggaagaatggccacgtgtgctgtcgtgtaccctgacgttttcacttgtgagcccatcttcacctgggctctgtcactgaataacccacgcagcctgccttgacaggatctttctccagcatgctttcgagtttgcctctgccgggcgtattatttggttgagactgctttttgttgttgttgttgttgttgttattttttctgtttaaggatgtctggacctgaaagtatgtcaatttgaaccccattctgttatctggaaagacatttttcttgcccagattctggacaaaagacacgcaaattcaacctgtcctgcttgtgaggtcgggtggactttcctggtccaccatcaaggccacagccttttgagggcacagctttcaagcctactggttgccgggactagccaatttaggggaagtgtcattatcttctgggttagctcttattttgtgtccactcattgtttcttaactgcctggggatttctttttataaatgacttcaacatttgaaaatgcttcttatcaccgagccagcttttctggtgttttgtagcaggaaggattacagtttaattgatcatatgtccagaaatggaaactggaaaagatttttacatttttaggatgtatactgggacctcataaaataatatgtgaaacttgcaaagctctttcagtataggagtagaaagggaaggagtgatacctacattcttgaacgtactgtaatttgtctggagggaagggcacatgattagtcctttggcctgcatttaatcatttaatatttaatcatttaattattctgcaattgctttttttttttttttttggtgacagaatctcactctttcacccaggttggagtgcagtggcgtgatgtcagctcactgcaacttccgtctccacgggtcaagcaattctcatgcctcagcctcccgagtaactgggattacaggcatgcactaccacacccagctaatttttgtatttttagtagagacagggcttcaccatgttggccaggctggtctcaaactcctggcctcaggttatccgcccgcctcgacctcccaaagttctgggtttacaggcttgagccaccgtgcccagccttgcaacaacttctttctatttcatgaacttcttaggcttcatattttctgttatttatagaactaattattatttacttgctattattatctttttcatcttccaaaagctcctctaaaatgtaagctccatgaggagcaatttttctgtgtttttcacttctgtattcacagttgtgagtgcctggcatgtactagaccctcagatcaaatattgttgaatggctggttgaaatagtatataaatgaataaaaatctggaaactcaagattttttctttcagtagattaagaaataaaaacgattgcataggagcctattttttcctgaaggggcccatatatttgttacttcaaatagtagacttccatgatatgattaaaacaatttctcagaaatttataagaaagttaaaatttaaaatgaaaatgctgatgcacaaatattacacttcctttggcaacacagatggtgattttgatctcagtggatgttggttaattcacagtgaaatgaattcatttccatcgtgattctattttaactcagataaaggctcgttaattttaattcagataaaaacttgttttttgtaaaataccattgaaaatgctcaatatattataattctagatgaaaattatgtctggatgaaaagagacagttgtaaaataatactagtcattatctaggaatgaattctattgcaggttatttttacctataatcacaggaataatgacagttcctttgtaacctgaaaggacttagtggaagtcaccctgtgggggaccaggccctggtttgttattatggagtttaacattgccacatattactgaatagtgatcaagattgtgcagagtaaaattgtatatgataaaagttcaatctatgtctgttgggagtaagaatcaagattggagggtgcatttcaaaacagataaatagcgtgtcagaaacattaggcatgaaacaattagacaaaactgtatttactgtattacaagcaaaattcatacaatatagacacataataagaaaggtcttcaaatatataatcacagcagagtcaaatctgtgaatcaaaactattctttatgtgcataattaaccatttcaaagaagagttgggaaaaatatttaaggatatgaaacagttatgccattttcaatgttcatttttaattccacctcgtaaaatacatctaaaatagtagaaaagtttaaagtctgttaaattatcctggagaataggaaaatagacgacttgccaggtttggcctaggagaaaatgcctagtagccctgtttatttttttccacatattctaaaaaaataaggaagcattgcctaactttcgtacatttcatataaatataaggtaacattgtatcttttgtccatttccatagaggttaagagaaaaaatcaagtttaaattaacacaaatactgtagtagcataaaagaaagcatgctttaatggttcgtttatttttagttactagaactagttcactaacatttcctaaagttagatttttgataactatttagacttgggaggagccctgcatttcttgaaggtcacgtgtgtctgaaacccggaactagtatagtgtctttctgcaccaatattctgtgaccctcttgtatgtaggaggtggcggggatcggattccccatgcatgaagcttcctttccttgggaagtcagtccctttctctgggcccctggtagaaataattcaccctttagcgccaggagaatctaagctttctctgctgtcctaattttaaaaccatgcctctcaatatgactgtagttaagattaaatgcctattgggttctatgaaaagggtagatttgggtagctattctaggatagtcagatacctgatttccaccattaatataaaatgtgtgcattttcttttatggtagaaaattcacactacaggaacattgatcatatgctttctgctttagtttctataaagaatgagtcacagagaagacaattgctttatttcaatgcctaggaagttattgcctttcaccttttgagcatctgtgttgcacacttaatggaaatacttgaaatataatattgatctacttatcaaattatagtaaatatgaagtaagaaacatcacatggtaacaattattcctttcactcaatggacatgattagcgagaaaataataaagaaatatttcgtatttgcagcctacctttaaagtattgaagcataattgtgaaacatttacaagttgctgagttgtcacttgtggaaatacaaaaaagaaaaagaaaaattgataaaccattgtcttatgatttcaaaaatttcacgggaagggggcagataataagtggttttatgcctataagttatttagaattccacatatttttaaaagggggttttaatatgttgttatttgacctgctttgagatgtctacagtcttgacttcttgatatctttgtatcttgttacagtcttattattacaagcagtgttaggcaattaaatttggaatttttttttttcaccagatgtatctgagtttctacagcaaacttgttagaaattgtgaaggcattttggattaagttaaaagtatacattgtacaacttgattatgacattaatattcaatgagcttattttctttgctatgaagtatgaatctatttgtaaactttttatttattcattaacattagcattagtaactcaaatggagcctgttaaaagtaagtagacttgataatataggtgttattagaactctagttcagagaggaacacatgttcaaccttaactcctttactttttatctttggaaaagtgatttttatttacttttggattagcagtgaaattattatttctatttaaaaataacactaaaattattcaaatagagcaacactaaagatatttaaaaaaaaacaataactgtaattgttagagccaaacctcaagaaaaatcaggaacaagccaggcgcagtggctcacgcctgtaatcccagcactttgggaggctgcggcaggtggatcacctgaggtcaagggttcaagaccagcttggccaacatggagaaaacccgtctctactaaaaatacaaaaactagccgggtgtggtggcacatatctgtagtcccagctacttgggaggctgaggcaggaggattgcttgaacccgggaggcggaggttgcagtgagccaagattgcaccactgcactccaggttgggtgatagaaactcagtctcaaaaaaaaataaagaaaaaagaaaaagaaaaaaagaaaactcaggaacaattttttgttgccatgagggatatcatagttatgtttcaggtgattttcttttttgagacagaatctcgctctgttacccaggctggagtgcagtggcacgatctcagctccctgcaagctctgcctctcaggttcacgccattctcctgcctcagcctcccaagtagctgggactacaggcacccgccacagtgcccagctaattttttgtatttttagtagagatggggtttcaccgtgttagccaggatggtcttgatctcctgacctcgtgatctactcacctcagcctcccaaagtgctgggattacaggcgtgagccaccgcgcccagctcaggtgattttctgaaagattattcagagagaaaataagctctaagaaaggaagagcttaactatagcacaggaaaagcaaaggaagtatttctacataatatccaaaaaatatcatgttcagtcacatcaggaagtatttcaggctttgaccactgtactttttagaattaacatcataggaacaatttgagcatgtgaacattctgtaactaacagtgaacttggatgacatattcatttcattcatactaaattcctctaagtggtctagctaataaactagcctatgtaattcagttaccatgcaagtcatacatatttttttgttgcagaaatgtatatggagtgaacaatgaaagattttgaagaatcaaaatatattacaataaaatccaatagaagtagacttcaaacagaaaagaggaaggggaaggctgtaaaatgtccagacttttaaaaggaacttgttcatgtatttttaaaattaataatagtggatatcatatcatgaattgagatccattggatatatttaggagattctaaaatgtttatttagaatttgcagtctttacatctaaactacatttttgtaattatttatatgtaagataaaatactgttaattgtacttaaagtatgcaaagggcatgtgattttctcagaattgtttcatgaagaatttgagcaaaaaggtttaagactactcttccaaaggggtagttttttttttgtttgtttttgagagagtcttgccctgttgcccaggctggagtgcagtggtacaatctctgctgaccgcaacttccacctcctaggttcaagtgattctcctgcctcagcctccttagtagctgggattacaggcgcacgccaccacgctaggctaatttttcgtatttttagtagaggcgggcttttgccatgttggccaggctgggctcgaactcctgacctcaagtgatccactgccttggcctcccaaagtgttaggccaggcgtgagccaccgtgcctggcccaaaggagtgttttaatggttagattattctagaataaattatctagaaacacacttaacaaaagcgacattagccttttttaatatctaccaaaattttcctttctctgctaaaagctgttcctgtccctgccctatcctgactctcctttgggtgtgactgcccttgagtttgagccagttgcccttcctctgggcccgctggctcctggtacacaccctttcatagcctcattatcttcatacatctagcccccagcaagcaacttgaaggcaagagatctggtccagaaacaaaataggccctttgtttgctgaacccagtggaaccgtattgtgagatttcagtgataaaccgtactgtgtaaagtccagagagatgatgccatagtttcacatgaggaatatataaataaagtttataagtttgatggaatggctttcattattgatattgatagattgttttccagatatgtagcattccaccaagggcttctcaggttcttttcaaaagcacaaaatagacgtgccatccagttgcatatgatcagtttatttcacctgtcattgattagtgaacctaaatttttctgtttctttcatatgcaaccagttgttctagaaagatgcccaattgccctcgatagctttgctgattgtacttgcctctgggtctttctgactttacttctatattcctgggctgtgctcttatacttcctaattaacccctaattctgtttcgtatataattgctttccacattcagacagtagaagagttaatgctttagctgacatcgtatccagcagcacttgtctctccttggtctggttgtcatcatttcgcgtagtgtccttctgtaaatggtccctgccttgcatgtctgtgattgttcagaggatttaaaggttatgtcctgtgggctttgtaatcgtgatgtgttagctgactttggaagtatctttgacatacattctgagatcgcattacatttcatccttttacagcttgtacaccacacattatttttttcttataataaagtatatttttaaaattaatgttgatccttttctatgtcccactcttttgatccttctgaatcttttaaaatttttgttgacatctacataaagctgttgtgtcaaggttgaagagaactagggtacctacttggttttatttctccatcaaataaccatatatccagtctgtggttatctaatgtacagggcaaaaagtgaacacacctcttttggttgtgtctgttttactctttgcagattctgaagcagtggtgtttggaagcaggcaggtgataagtcagtaggtacatgatgagcagttccaatactgatcggcacaatgctggactgtacaaatccccacagaacccaaatggggacaagtaaccagatattcatcataaagctgaatctgaagaggttgccagaaaatgcatccctgaaacaagtattcataaattgtgtttaatgagttcaaagataaatacatctaattggattataaatagcctacctattccacagagctgttacaagaatgaggtcctgggccagctgcagtggctcacacctgtaatctttgggaggccaaggcgggcaaatcacttgaggtcaggagttcgagaccagctggctaacatggtgaaacctcgtctctactgcaaatacaaaattacccgggcgtggtgatgagtgtctgtaatcccagctattcgggaggccaaggcaggagaatctcttgaacccgggaggtggaggttgcagtgagccaggatggtgccattgcactctagcctgagagacagggtgagacaacatctcaaaacaaacaaacaaacaaaaaaatgaggttctggttttgaagactctttgtaaactgtgaagctgtatactaactgctattattggaatctcttctttttcctaacatgcctttttttttttttctagcagttcagtacataggaatttgaatgtgggtcagaatatcactaattttgattattattacaaaggattattattattacaaaggattattattacttacttatttcacacttgctgtataattgtcaaaattgttatccttcattgtagaaacattttaaattactgctgagttagcttaactgaagtttaacctaaattcttaatgtattcaatacctcaaggtgaaccccctcccacccattgtattgattgtggaaaaaaaagcttatatattaggtgatatttggtattaaaattttcagagtacacagaagagatgaacatgagtccatttaaatgttccttttagtcatttttttcttcacaagaataatcttacaattgcatcgtttaagaatacttgatgtgatagatgtcctaaataccctgacttcatcattacacattcaatgcacgtaacaacatatcacatgggcaccataaatatgtacaactattatgtatccgtgaaaaattttttaaatttaatttaaaaaaattaagaagaggatactcagcacttagcaaagcagaacacgacatgtggccagtttagatgatactaacaaaaatgtacctataaagaaaaacaaagttctgatgtgacacttacaaaaaaaaaagaaagtatcattctgcctgtgtattcctagctgtgtttgcctacctctgtcccttgcctctatccttaaatttggagccatttgtaatggtttcctaacaaccatctggggcttgtagcctaatctcagcctgatgcatcttgagcacagcctgatgggaaggagtgcgccattcaggaatctggctcctgttccttcagaggagggccccccatgagacagtgaccacctgtgtctatgatatcatcagacctggtgactttgaactagagtagctcccaagctgagaggctagttgatacgaggcctggagaggatagtctgtggggccagccattcccacgttgccagaatgatcatcatgaggctgttgtgtgcccagagtatgtgctcctaagtgacacgttgcgtctgtgccgggtcatggcggtgttttgtttttgttttgttttttcaccaattcactcataataaaaaagtattccagagtactgatgaaagcttgatgagtctgtaggttatgtcagtgtttcttacgggtttcattgtggctttcattgttttcattagtcttcattaagactagagccagctgtctatgtgtgatgtgggctttagtgaaactgatttaggttgcaatcccattcaagactggtggacagaagattcagatggaaagtggcaagaaagccgcaagatcaatggatgctttgaaatatgttgtactagccacttgttttctgctttattggttcactatcttaataaaaaaaagaaagatggctaactttgcagatagattaaggttgatacaaagttggaattaaggtcattacttttgcttttcgtttagtatgtttatcagcaggtatttaaaatttttctctcagatactttcttttcatttggaaaaataatctgaatggaaattttatggtctcagaaggttagtattattcctaaaatatattactattagacatgaacaatgaaaagtccttttttgtccatatatatgaaaaattccataatgagcatttattactttgctattaaaaacatataaattttattttaaaggaaaggagaagaaagataaagacatctggcacttttggagataagctcacatgtgtttacatgcacacacacacatcttacgtgaaaattatatcaagtcagaaagtgactaatacatttacttggtgtctcattcacaaattatttaatttccaacgagttagcccttttattgaaatcccttaagtgagttcagtttttaaagtgcttacttaatgcctactgtgtgcacaatactgtgccagatgctgttggagatacaaatgtcaagtacagtattaccatgacagaaacaaaaacataaagcaatatgtgaatatatgtttataatggccagggaggttttaaagtgagaaaacaaacagagttgcaagaccagatttctagtaatggtcgaaagtattgagaatacaaatgcaaatatcaacaataagcctaagtgtatctctacttttaatataaatgttgctgttatgagtatctgggaaggcttagagccacattcattattattcggttacaccatgaaaagatgtgttttgaatgcgttgcaaataatctgaaacacagaaaaaacacatattaaattttaaaagttaaatttaaagttaaatgtttaaaaagggaagacaaaaaaaaagtgtacttatgagtacagctgtttaaacatacagtcactatcctttcttttcccagaagtgtgaatgaggaagaaaaatactgggaagaaagaaagcaaaatacgaatatatctgtttatggatggtaggagctatcagtgttattttttttaaatttcttgtaacatttttgtatttttgagagagagagagagattgaagatatttacaatgaaacaaaggagaaaaaggcaaaaaagtctagtggtggtatttttaaaatctgcgtaggtatgaccccatgtgaactatctcaagggtatgtgtttgtgttgctttatggcataagggactatgtaaagaacactaaaatttgtaataagataaaacatcacagtcatacagtttgtcagaaatcccagaatttcagctggagcataacagtacaagattgatgagccatggtgcccaaaggtggggtgctttgcagggggaggagagctggtgggagtggaagagagtgagaggatggtgacctcagctttcatccggtccacactcatagtgacggtaatgacagctgcaacttactgcgcacccaccgtgtgccaggtgccacccagaagctttctttatggcactgtacgttaatggtgatgaaaaatgagctctgggccgggcgcggtggctcacgcctgtaatcccagcactttgggaggctgaggcaggtggatcacgaggtcaggagatcgagaccatcctggctaacacggtgaaacccagtctctactaaaaatacaaaaaattacccgggcgtggtggcgggcgcctgtagtcccagctactcgggaggctgaggcaagagaatggtgtgaacctgggaggtggaggttgcagtgagccgagatggcgccactgcactccagcctgggcgactgagccagactccgtctccaaaaaaaagaaaaatgagctctgctctaataaagcaaagcaggaccgcacaaagcacagggacactgcctggacatagtgcccacctggctggacagtgttatgaagttcccatttcctgggaaactcagttgttttttagaaatcctagtttaatattgtttgctttttttttttgttaatgtgaggaatattacattctgatcatcctatttcttactgaaatttggcctttctcacagcaaaactcactttgttccggtgggcgccgcggtgcacacctctaatcccagcactctgggaggctgaggcaggcagatcacttgaggtcaggagttcaagaccagcctggccaacatggtgaaaccctgtctttactaaaaatacaaaaattagttagggatggcggcatgcacctataatcccagatacttgggaggctgaggtaggagaattgcttgaacccaggaagcggaggttgcagtgagccaagatagtgccactgcactctagcttgggtgacagattgagactccatctaaaaaaaaaaaaaaaactcaaaaactcacttagttcaagtatggttatgttgatatgtaacttttttcccaaagaaaatatgaaaatttctagttatttgtattattgagagccaagttatgaaagatgtataatctccttgcaacatagatacatttttctctccctttattctgcatgataattcaaatgagtaaagctttcattttgctagtcaagattactttctttctgtgcttctttatgaggaaagtcattttgtaatcatcaaggaggtttattttgatattcttaaaggtaaatcactgcaacctaactgatagtctattatgcttatatttaatcacatattatgcatgtataatcatcagattaacctattctttgcataacaacacagtaatgtttattttcattatgactattatattatcataaatatatttattgccattgttctgtaagggggaaggactaccatttgttcccgagactctatgttttatttttgatagttgctaccaggtcaagaagtgagactagtctttatgtcagtgacaactgtaaccccaggttttaataaatgctactgtgggctgggcgtggtggctcacacctgtaatcccagtgctttgggaggcctaggtgggcagatcacctggggttgggagttcgagaccagcctggccaacatagtgaaaccctgtctctactaaaaacacaaaaattagctgaatgtggtggtgcatgcctgtaatcccagctacttgggaggctgaggcaggagaattgcctgaacccaggaggcagaggttgaatgagccgagattgcgccactgtactccagcgtgggtaacagagtgagactccatctcaaaaaagcaaaaataagaataaatgctactgtgtgcttatgttatgttcttataaaaacattttaattaaatgtttgttaaaatgtagttctttattaaaatagcgaggtgaataagtcacagccttcttccacttggatctggtgattttaactatatagcttacctttcacatgaccattggactaatagagcactgatgcctgcattgtgtctgcattagtaggacctgccacagtgcctatcacgggcatgtaaggcactcggtcagtgttgatggaactgaactcatttctttaaataatcaagaacaagtgtcttaattgcaagctttaacagttcatatatcttttggcctaatttattctgtctctctctctctttttctgtgtccttcaaacacatgtttacagaacttctttttctgtttcaagggaaaaagtcatccatttacttgattagaaatactgtttggctcttgatattagatttaatatgcagcagctgtcaaattacgaaccggcttatagcccctcgtggtagatttcaagtcctgattgctatgaccttaactcatagtcatattggagaggatggcacaggacctctttctcttctgagattcccaggacacttactcaccaaccagaacatggtaatggggtgataatgtgtctcagtcagtagtgttcatagtgtacctttgccctctccatgaacatataaagacatatttctgacaatcatagcagaacattttagtggtttctcacagatagcattagcagagtacattttagtttcgaattaatgctaactattgaaacacaataacttcggagatgccaatatcaggatattatcaaatctagatacttataatgctttatcacgtagttagaaggaggtacgttgcattattatgacattcccaaaggtacctccttttaattttgtctactgaacttatatacaactttccccttattacccagcacatagggtcaggctaaatgggggtgaatcctggctcctctattgggtgccttggtgacactgaggtagttacttatcctatggaaacccagcttttgcttttgtaatattggagatgttattaatcaggttgatgtgttaaataatgtaaattggctgggcgtggtggctcatgcctgtaatcccatcactttgggaggccgaggcgggtggatcacttgaggtcaggagttcaagaccagcctggctaacatggtgaaaccctgtttctactaaaaacacaaaaaaaattagccgggcatggtggcacgcgcctgtaatcccagctattcaggaggctgaggcaggagatggcttcgacccaggaggtggaggttgcagtgagccgagatcacaccattgcactccagcttgggcgacaagagcaaaactccatatcaaataaataaattaataataataataataatgtaagtctatgaaatactcagtatatttgccctgaaatgtggaatcaaaaataattaccaacatttactgagcattttttatatcttttaatcattcatatgtacgcatgtaaataactgctaacaggaaataagagaagaatagaattatgacaggtttgaagaatgtttgtaaacactaatgccctgcattacccttgagataattggagtaaatatctatggaataaatgaatggagccagagaattttccagaatataggaattgggtgcagttagaagaactaaatgcagccaatgggtaacgggacaaatgtggtgtgtaagggaagttagtttgctgtcggaggacatggcccccataaccactcatttttagatatgcttaaatgtttactgtgatttgatattaattttattttagagttaaaagtacttacgataaaaatgaaagttaatttctaatatagtccaagaaaggtatttataggccaggtgcagtggctcatgcctgtaaccccagcactttgggaggctgaggtgggtggatcatgagatcaggagttcaagaccagcctggccaagatggtgaaacccagtctctactaaaaatacaaaaattagcttggcacggtggcaggcacctgtaatctcagctactcgggaggctgaggcaggagaatcacttgaacccaggaggtggaggttgcagtgagccaagccattgcactccagcctgggcgacagagtgagactccatctcaaaaagaaaagaaaagagaagaggagaggggaggggaggggaggggaggggaggggaggggaggagatgggacaggggaggggaggggatgggacaggggaggggaggggaggggaggggaggggaggggaggggagaggagaggagaggaaaagaaaagagaaagaaaagaaagaaacccagaaaggtatttgttgaattggtcttgaaaagttaatttgaagaactttgacaatatttctgaaaatccatttataggatatgcccacaattcattgtatggctggcttttttcccttaatttagagagctggaaaatcatgatatacaagcataaattaatgaattttttgcttgtgattcaccttctgactcctggatctaggagcaaggggaattattctgattattttttcctggctggactttgaaataccctgtctctaatcagtagcagctatgtttaaattctttttaggggcaaggcaggaattctaatttttctgaatgtacagagtgttcctctcagcaattgactttgtttattgactaatgacagattttccctcatgttggttaagaataactttaaaggtatatcagataatgttttgtgtacagtgttctatgttctctgtccaggcatatgtaaatatagtcagtgttttttttttttttgttttttgttttttgttttttgttttttttttttgagacggagtctcactctgtcgcccaggctggagtgcagtgacgcaatctcagcttactgcaagctccgcctcctgggttcacaccattctcctgcctcagcctccccagtagctgggaccacaggcatctgccaccacgcccggctaattttttgtatttttagtagagagggggtttcaccgtgttagccaggatggtcttgatctcctgaccttgtgatccgctcgcctcagcctcccaaagtgctgggattacaggcgtgagccaccgcgcccagctattttcagtcttagccagtaaactgcatttaaaactccaagtacttcagtaagacagcagagatttccaaaggtttcagaggatagtggtgggttatatttttgtatggcttttctgagggttgttttattttcatttgaaaattttttctttataggatcatttgctatttggtaatttttttcatttgaatggtggaagtccttaaatatgctcatgtagagtttatgagtctcgctacttgcagagagggataactctttagaatggctgccctctgggagaggaaaagcataaacagagagatgctgagtgatagagcattgctaaatcaacacatcaatctcaggaataattgttggattcatcagtgaagaatgattctaccacttaaggaaaggcttcaggagtatatatcctgttctcccagcaccagccagcccttttggatatgagactattatattcacaggtggagttttgtttgtttatcgaaggaaaagtgactccaggaatgaaaaagccatgattcacaaagaatttctcgcagtgtttctgtcctagctggtcacttcagaagctaactctaaaccctatacctctttctagcctttgccacatagaatggtcattgtcttagtgcatttatgctgctataacagaatatcacagactaggtaatgtgcaaagaacagaaatgtattgacccactcttctggaggctgggaagtctaaggtcaaggtgccagcaggttttgtgtctggtaaggtcgttctcttcttccaaggtggcaccttgtatgccgtcctgtcctcctgagcgaggggatcaaagaggcttcaaatggcaggggcaaaggggccaagagataaaaaggcacacaacttacccttttataatggtattaatcccatccgcttggggattatcgccctatctcctcctaaaagtcctacctcctatcactgtcacaatggcagccaaatttcaagatgagttttgaaggggacagacatgtaagccatagcaatcacattttcataaacactgtctttccatatagcaaggaagcatagcaaagtaagaacttaaaggcttattttccttgctgctgaatttaatatcatgtgttataattcagagacatgtaaggtacagtttaaaaacagccaataagttttttagagacccactgagtacctagcactgtggtaggtcttatgcgggattcaaaagcttaaaataaaaacaaaccatttaagcatcagacttggactctgttcattaaaatgcaaagagagctgagtttaagagcttggtaacttgggttttaagaggaataaagcactgcagatattatcatgcaaatttgaacttgaatttggtcctagaaataaatttctattcgtaactccatcttttctttcagagacccttaggctatctatatgacaggataactccgtgaacacaaaaatgcaggcaccataatcaggatattttatcctcagtatccttaactcctgaaactgaaataactggatgatacagaacatttattcagctttcatatgtgcaaagtcacatggataaacattctcattccagtgtattttgttttccattttaaaaatacttaatgcttgtttttatacattttaggatctataaatcagtgagaactgaaggaggacaggatttcctcctgcaaggcatcctttgcatacataatattggacttctctgcttcagtgctgtcttctcagatggatatgtaatgtgtgaaatgcttaataatgtcatcaaagagatttatatgttcatgttttgcagataagagacttaaccacagggaatttaaatgacttgactatagtggttagcactctgcatttggaaataattcaaatttttatctaagtctgtttaaatttttggcttttatagccctttgtgagagaggtcatgtgagggaaaacatgattccccctctccctgttgggtttttggggtctacctttgtgtcttggttttgaccagccttctcataactatattccaaagataaattaggggaaaatgtgcagatagttcagttaagtaatttactttacctaactctattagttgagaaaaactcttaaaatctaagttaagtatatatatattttgagacagagtttcactcttgttgcccaggctggagtgcagtggcgtgatcttggctcactgcaccctctgcctcctgggttcaagtgattctcctgcctcagcctcaagtagctgggattacagtcgcctgtcactacgcctggttaatttttgtatttttagtagagacgggattttgccatgttggccaggctggtcccgaactcctgacctcaggtgatccgcccgcctttccctcccaaagtgccgggattacaggcgtgagccaccgcacctggcctaagttaaatatttgtctttgtatatgaagatctacaaattctttatgtaagtcattccatgggaaaattagaaattggtttccttttcttgttagaccatgacactggtgagctaggaatttaatattcatttccactttttcattaattgccatataactaccttgaatattttactattcattctaagttaaataatctttcaaaatctctcctgaaaagtaaattgcttatgaatgaatctaactgtctcttttgaccttcacttaacctcctatatctcagatgcttggtattcttttggggaaaggaaatcaaatttgtcttagtatcagttctccttttaatacgtttaatctttttattagccttgtgacagcatcttaacttagtggtgacaccctcattgaacctgctgtggcacttttgactctttctcagaagagtggtttctagcattgactccattctggtacccgaggagcctgggatattaatgttttctcaattcagcaagtatgctagacattccattgtatttttagtacatgccactgaatgatgtctgtcttacactttggggcgaggggaggaatctctgaagaagtggcaaaggcgttatatactcagcaagcgctcaggattctacagcagagggagcactgatggagcctcagattgatcagcctgctgagaacctgtgcccagctccttgctgtttgtgtgcttccacatataaacagtgtagctcaaggtttctgtgggaaaggggccttgcctaattgcctcccttgatgtattgtccaacacagttcatggaccttctcacatccagatgaatttcataaaatattttcttgcctgttcctgacacttgctggggggcatcgtacagatttttttttttttctctgtttgccattgttatcctcctaatacaggtccctgtcaccccatgctagattggtcacacctaaattgctcccaattctcagtccctccttgaagttattttctttacttttttttttttttttctgagacagggtcttgctttgtagcccaggctggagtgcagtggtgcaatcactcctcaaagaaatctccaccttcctgggctcatgtgatcctcctacctcagccttccaagtagccgggactgcaggcatgcaccaccacacctggctaatctttgtattttttggtagagatagggttccgcaatgttacccaggctggtctcaaactcctgggctcaagccgtctgcttgcctcagcctcccaaagtgctgggattgcaggcatgagccactgtgtgcagccaatgttactttcaaagcaccatctgataccatggttccttgtcaccgaaagtccagtgtcttgtgtcatatgaactccaaactcttcagcccacttcacatctatgggactggatcttaaaaggagttgtattatactgagaaaataatctaaaataatgataacgttcatgataggtcatgtttaatcaattcagcaaactcttgtggggaatgtgttgtggggtatcacccatctggggaggttctgtgtatatgtcggcatgcaaacagggcattccataagaagctgagtctgctagagaagaaagacatgtcaacagatagttacaatataagcccaataattgtgtgtgtgaacgtgtgtataaatctgtgttgaatttttatatgtttgtaaatgtgtgtgaatgtgtgtgtttcaatctgtgtgattttgtgtgtgtgaaatttgtgtgtttatgtatgtgtgtgtgaatctgtgtgtatctgtgtgtgtgaatttgtgtaaatctgtgtgaatttgtgtgtatgtgtgtatctgtgtgtgtgaatctgtgcacgtgtgaacttgtgtatgtaaatctgtgtgtgaatctggatatgtgtgtgaaagtgtgtatgagaatctgtgtgaatctgtgtgtgtgaactttgtgtgtaaatctgtgtgagtctggatatgtgtgtgaaagtgggtgtgtcaatttctgtgtgtgaatgtgtgtgtgtgtgtgtgcatgaacttgttgcatgtagattttgtccactgaaggaagttgaggcaccctccactacagtgattaggagtctctagagataaggtgattagattgggtcttgaaggagtattgggtctgagtatttgctgggcatggaagataaaagatttgaaaagtcattctaagtagaggaatcagcatgtttaatgtcatattcttgaaactaagtgacagatagattcaatggactgggagtcgcaggattggaggagaggggcacatggcaatgacaggctttgatttctttttccaggaaaaggctcaacattcatttgctatgtcaaagaagaatatgtaacataagattttaaaagataggaaaaattggttcaaattgttttgtagactgatgactaaagaaacatatgtgggtaaataaactttttgaataagaattgaaggccagtatgtttttctgtcttatggtgtttaagttacttttgtgtcaaccttgaacttttggaacttaagttcatttacttttagtaaaatttgttttcctttttctaagaaaaaatatgacataagttagacttaaatgggatttttttgaagataaaatagctcttagaaattttgcattttgatgagatgaatttaaatgaaccaaatgcagtcaaatgaacagcccttaaaatatactatgtgtgaaaaatcaaatcaagaatgcttagagcaaaacatttaaggctttattgtattgaaaccatttgaaaagtatattctaaatgatgaacaaatagagtgtgtgatcaggttttataatttaacactgacttccctcttttccatgcttgtactcctttcctgttctatatacaattttcctaaatacattgtcctcaaaacagacatttaaaatagtattgctgttttattataagaaatatttatgctgtttgtttaaatatgtatgagatctagaaacatttaaaaacgataattaatttcacatgcccggccccagactgttaaacttttgttgcaaagtcctctgaggccattttaggcatgcgcatatatgcacacacataaccttttataacatatttttaatacattatatttaatacatttaattttcatatttttaattaaaacagaggcttatactatatatatgtttgtatatatcacatagttttgtacatgtttttcactcagtaccattaatattttggttgtggattactatttttagtggctaaatattattttaatttgtccaaatatttcctcttgataaacccctatgagttgaattgctggttgagagaatatccatatatcagcctttgaatgggtttttatgttcccgtcatcagtggttgcgagtgcatatgtttgcacaccctcatcaatattgaagttagcttcctttcaatcatttttgccaattgtatttatttagttttcaaaattttttaaattaattataggtttttgagacagagtctcactctattgcctgggctggactgcactggtgtgatcccagctcactgaaaccttgacctcctgggctccagtgatcctctcacctgagcttctcaagtagctgggactacaggcatgcaccatcttgcctggctaaattttttagttttagtggagacagatcctcactatgttactgaggctgatctcaaacccctggtctcgagtaatccttctctcttggcttcccaaagtgctgggattataggtgagccactgtgcctggcccatttttgccaattatattttattttattttattttatttatttattttgagacagagtcttgctctgttgcctaggctggagtgccatggtgtgatctccgcttactgcaccccccgcctcccgggttcaagcaattctcctgcctcagcctcctgagtagctgggattacaggtgcctgccatcagacctgaataatttttgtatttttagtagagacggggtttcaccatgtcggccaggctggtctcgaactcctgaccttaggtgatccacgtgcctcggcctcccaaagtgctgggattacaggcacgagccaccgtgcctggcccatttttgccagttttagaattcaaactgttatcttattcttttccatgtgatttgattgatttttttcctattattgatcatctttttttaagttatctgtttatatctttgcttatttattgggggtatttatctttttcatatttatcagagctttttatagattgaagatataactctctttggttatgattatttctccacctactcacttatcttttaatttgcatatgtgtgtttttgtgtatgttttggcatacagacattttaaagatttagttcgtcaaatctgtcatcattttttatgttttatctttatggtcgtgtttagaaatgaaaggcattatttttgccatttttcatttacctgaaagaaactgagcccaccctgatggtaaatctttagtcactaagatgccgtgaggggcatcaaatcctcgctctcaattcgtcttttattcaaaatgtacaataagtagtcccttttttttttttttttttttttgacggagtctcactctgtcacccatgctggagtgcagtagcaccatcttgtctcactgcaacctccgcctctctgggttcaagtaattatcctgcctcagcctcctgagtagctgggactacaggcatgcgccaccacgcccagctaatttttgtatttttagtagagacagggtttcaccatgttggtcaggctggtctcgaactcctgacctcaaatactccacccaccttggcctcccaaagtgctggaattacaggcgtgagccactgcaccaagccagtagtacctttttaaagggaagaagtgtttttttaggaaagcctgtgagattccaaagtcaatctgaatgttcaacactgggtaatttcatttctgtgtctattgcccaccccttgttcaagttagtggtaatgcagcgttgatttcatcttcctaatatgaaattttcttgtttacatttagtgtttgtattaatagacagcatgccttttgagatttgacttttattaataattgtgtctaactgtccaggcatttttgtgatgctctagccttcccatcatactttaagactgagtcagcagagggaactgcatgttcaatggtacataggtgagagagaacatagtagacaggaaactggaaatcaggatatggtttctgaagagaggacatggtcagagtgaggaggcagaaggaagcagagtgagaaccaaggttgaagaaagaagtaagattcaagccatgcgtggtctcctaaaccttacagggagattgaacttcattataaaccaatagaaccaagataggatttttccaagggaagaggcacagtcaagacccaggttttatggctacagaatgcaaaactgaatggagaatgactggagagttgctgctgggggactgttgcaagagtgtacaagagatccaagcaaaacctccaggccgattgttctcttgttctggaatatagggtgtcatgggtctagagggcacaaatcctatggtgtttatttataatacaaatagtgttgaggagtccatggagacagtgagacctatagcctgtgtgactgggatgtagccctggccattcttttagacaccaaatatctgatggtgatgacaggctcagttgtggatgtgtagtctgtataaaaatgggtctggagctgagaaatctgggaatgtgctagagaggcaagcatggaggtcaagtctgcatgtatcagcatagagactaaactgtaagtcctgggagctagggggtcaacaagtaagactgcattaaatgaaaaaagaccaagggaaaatacggaggaaaagcggcatgtgctctcaggaagctgagatacaattgctggagggagaggaggacagccaggatgtcttcaggaattcacaagtgagagcctatgaaatcatcagaggggtcacctgtgtagaatgagcaataaaggtcagggttaaaaatggtttactgggtgtgaccatgcagaggtcattttgcagtcttttgtctgaagcaatgaagaggtgaagaacacagtaggtagttctgtttctaccagaagacatcgctttctccaagactgacagaagatgaagatagatgcagatccaggtgcatggcctggaatttgagggacgtcgagcctcattttctccatggcatagaagaggccttctgaaggaggagaggagacctagtagccattaccaagaacactgatgagtttgattacataaaaactgaaatgttatgtatggtgaaagaaataacaaatagaaataaaagatggaccataaactgggagagaatatttgaaaagcataaaacaaaggattaacatccctaatctataaaatgtgaaaggggaaaactcaactacactgttgccaagtccactcagaacaactagtgtacataatggaaaataaaacaaccaatccatttgacctcactggaatcaagcaagttcatattaaaacaacaaaatacctctttttgtctatcaaatcagcaaaaaaaaaaaacaacttagtatcattcactgctgttgaagaaataggggctatatgtcttattgatagaggaataaattacttcaacattttgggggatagcaatcttatgatctcttcaaaatgtacatatgcatttcctatgaaacggccatcctattttgagaatttagccttcagaaataaaactacaggaatgtccaagatacacgttgaaataagtagcagtattgcttctagtgacgaaatattcaatgtgaagatccatcagtaatgaaatggtagaataaaaaccggaatatccatactatgaaagagacgttaaaaagatggttggcttaagaatatcatgatgtaaatgtaactgggcagcataacctcaaaatgcattttaaaacttttttttttcctctttctcttgggtttcaagatgtaaccttgaagcaaactacagaagcctgtttcctttagccttaaaatagactccacgtccctccgtttttctccagatatactcccttcttatttatctaactgtacgctagcatctaattatgtgccttctttgaagatttgggggctaatcttgagacagacagaccaagcctggagacccagctgcagagttccagagatggcctcagagggctaatcagcagccccgccactgttgagatgatgccagaccatgtaccaggtggactgggacccaagatagccactggaacaagatgcacaggcatcgtcctcagcacagttctggcatgcctttcgtatcaagttctccctttttaaactctttccttccccaccaaaatttgaagtagttgctttggatgggaatccaaccacttccccacgactagttttggttaataaagtcactttctttctaacaggcctcacgcttgttaattctactctgcaagcagcgagctttgtgttacataaatgatcacaattcagaatatataaatcataattcagaataagttatacattccctttaaatgaacttatgtaaatgtatttcacgtttgtacaaataagagaaaagtacggaaagatgctagccaaatttttaactaggaaggggtgggtgatggaagtggcattggtagaccagaggatgtgactcattattaaaatgtagaaacctcaatatcacttggattactagcaaaagcatatatgacccatttaattcacatcactaaaataaaatgagtaaataattttataacaaaagagacagtaaacagaacagacttagtagaagcaagctgggtctagctggaacgttgtcacaacgaggaggtttcaaaggatggaagaactcgaaggtgttatgatcctcaggaaggggaccaatatctatgcatgggagcactgaaagtctgcagacgacagagagccagaaagatctccaaatcagctcctgggcctgcctgtgcacgagaggcagtgtcctccttggggagcttgcatgaaaaaaggtggaagcttgcatgcacagagtgagggctgggaggtcttagtttttgaggtaagcctgcatttcagttttaggatcacccattggaatgagtgattcagtccaaggcttggaactcattttctgtttggaatctacccaaatatataagacattctaaaaatggaaaatggagcacccagaaagtgaaaaatgtaattgtaaataaaattaagagatgattttgagaaatgtgggcatttaaaggacagtttttaagatattctgtatgtctggcaattaagatttcaatgaaacacttctgttgccttttactgactgttgatagctttattaatgacagggggtgacacacagatattaaaaatgcagaggagaattactggggagcaaagggaagagccccagggggttttgtttgtttttaggttacgcagagttttttgagaatagtttcacagccacaggaacctaaattttctataaatatttttaaaggagtggatggataatgtatgtctgcataataagtgttatcattcatgatttcctgattgattttactgaaagagctagtgagattcctttaatgctttctttcaatagaattgataatatttttctttccctggtaggacattttgtagtaaagtaaggacactctgaaaggaatatttcagtgccccaaatactgtaaaatgatattgcccccatgaagacgttttgctctctctagtgacagacttaaggatgtctgtctacacctggcccatcaggatagtaattcggatgctgtgacaacttcactgctccattatcttcattctgcagatgacagctggagcaagaggagctaagctggattacaaagccaattaatgtcagggcttagctgtaaatcttcttgtgtaagtcttggatatgttttctgtagccataaattctttttcacgagtgctgagtgtttattctgtagcagtatggaagcatgtagagtaaaacccaagttacttaacattatgcaggagatcatagtaagcaataatttgggatatggattttcctggaaaatttaactcattcagcatgacagactgaaggccaccttcagaacctacgtggacattcaaagacacatttgggacaggtgagacagtacctaaagggggtaatagagggccagagctcaagtctaggtgccaggatgcaggctggatgggtaatgagatgggggatagtcaaagatacactaattgttcaatcctaggtttgcatctggaatgtctgtttgtttttttttccaaatttgtctaagcatttctgtgctctcaggtcatctgtacctttattatacttgcttttgaatgtattggtctcagataacatgacagggcaatgagtctcacatttgtggtttaatattttattgatagtgcagttacttatctgcattttcctagttctcttcatatttctcttgctgtttatcctgtatgccacctctgggctctttcctcgttgagcatatgttgcctgcctcctagctccatgccaggcttctccctgaagtgccagctcaggcaccttgctcctggctccctcaacttggacatcccacgggtactttacatccagctaaaatcttcattgctgcccctaaatcaatggctgttttctcgtgtggggaagtcacatctacccagtcctccatactagagttttctgttttatcccttctcactgagtgcctacattcaaccaatcacaaattttatctgccaaaagtttgtcaaagcagttttaatttttttgcctaactattgcctctgatcagtcctgaatcatcttttcactagattatcttttttaattattatttttgtgggtacatagtatgcgtgtatatttataggatacataaggtgctttttttcatttgttttgcttttttttttttttttgaaatgagtttttctctgttgcccaggctggagtgcaatggcacgatctcggctcactgcaacctctgcctcctgagttcaagcgattctcctgtctcagcctcccaagtagctgagattacaggtatccaccaccacgcccatctaatttttgtatttttagtagagacaggggtttcactatgttggctaggctggccttgaactcctgacctcaggtgatccacctgcctcagcctcctaaagtactagcattataggcatgagccactgtgcccagccatgagatattttgatacaggcatgcaatgtgaaataatcacaacatggaaaatggagtatccatcccctcaagcatttatcctttgagttacaaacaatccaattacactctttaagttattttaaaatacacaattaagttattattgactgtggtcaccctgttatgctatcaaatagtaggtcttattcattctatttttttccctcccatcctccctctaccttcccaacctctgataactattctcctactctctatgtccatgggttcaactgttttgattactagattccacaaataagtgagaacatgtgatgtttgtctttctctgcctggcttatttaatagtttccaattctatccaggttgttgcaaatgactggctctcactcttttttatggctgaatagtactccattgtacatgtgtaccacgttttccttatgcattattcatctgttgatggatgcttaggttgcttccaaatcttaactattatatacagagctttagcaaacataggagtgcagatatatcttgtatacactgatttcctttcttttggatatatacccagcagtggtattgcaggatcaaatagtagcttaatttttagtttttgaggaacctcaaaactaaaaaataatcttctccatagtggttgtagtaatttacattttcaccaacagtatatgagggttcccttttctccacaaccttgacagcatttgttattgcctgtcttttgggatacaagccattttacctggggtgagataatagctcattgtagttttgattcgcctttctctgatgatgagtgatgttgaccaccttttcatatgcctgtttgccatttgtatgtcttcttttgagaaatgtctgttcaaatcttttgcctatttaaaatgatcagattattatatatttttttcctatagcattgtttgagctccttgtatattctgattattaatcccctggcagggtttgcaaatatgttctcccattattttggttgtctcttcactttgttgattgtatccttttactgtgcagaagcctttttttcagggctagctgaggttttattttggggggaaaaaaataaaagcagttgagttgttttgtagctgaaggcatgggcaaggtggtccccaggcagtaaactcccccgtgggtgggctgagggctagggctgagcctcaggtgggtctcccattccctgtgctccgctgcacagcagcctccctcccaggctctggggcagccaccagaggggcaggctgggaggggctgtcgcagctgttcacttaggaaggacatcagaggactcggataccagcttcccatcgcaggtcttgatcttcttcacaaccatggccctggtggagctggtgcagctgaaggagctggagcccatgtcagagccaaagctggagcccaggccatagctgaggccagggcttgtgagacccccataggccaagctcagaccatctgcataggcgctggtggtctttgtatggatactcatgttctgcatcccagactccaggtggctctcctcactctccagcagcttcctgtaggtggcaatctcgatgtccagggccagcttcatgttcttcagcttctggtactcatgcagctgccacgccatgtcctgcatggcctgttgcagggcagcctccagcttggacagcttggtgttggcatccttaatggccagctccccacgctgcttgacatctgcgatggtggcctccagggaagccctctggcttttgaggccctcagtctcagcctggggctggctgatgttccagttcatcttggagatctcagtctttgcatctgcagctccttatacttgatctggtacatgctcttagcctcagcccggctgaggttgggtgatctcctcatactacgccttgacctcagcaatgatgctgtccatgtccaggaagtggctgttgtcctggacagcaccatagatgtgtccgagatctgggactgcagctccaaggtctcctcttcatacagctgcctgaggaaattgatctcgtcagccagcccttccagctgagactacagctctaccttgttcacgtaagcatcatccatgtccttcctgatgaggataaattcattctccatctctgtacacttattgatctcatccttgtacttgttcttaaagtcctccaccagcccctgcatgttgccaagctctgcctctagcttcagcttctcctggaccagagtgtccggctgccccctagggttgttgatgtagctcttgaacatgttgcccatgttgctccaagccatcttctgctgctgcaggaggctccacttggtctctagcatgttgttctgctgctccaggaaccgtaccttgcctatgaaggaggcaaacttgttgttgagggtcctgatctgctccttctccttctcctgctcctgcacggcctggatgttggggtccacctccaggttaaggaggctcagcagtctctggttgaccacaacggcggtgatgcctcccatgccgccggccccaccagagcctccacccaggccacccccggaagctgctgctgcccatagaggtggacaccttataggacttctgggtcaccctgatggacatggtggaggcaggagtagaggcaagtggattgaaccaggcagagattccagaaggagcagagaagctgcttcttggtcactgtgcagaagctttttgacttgatatgatcccctttgtccatttttgctttggttgcttgtgcttgtggggtattgctcaagaaatttttacccagacagaccagtgtcctggagagtttccccaatgttttcttgaagtaatttcatagtttgaggttttctatttaatttttaaatcgattttgctttgatttttatatatggtgagagatagaagtctagtttcattcttctgcctattgatatcctgtcttctcagcaccacttactgaagaaactctttttcccagtgtatgttcttggcacttttgtcaaaaatgagtttgctgtaggtgtgtggatttgtttcttggctctctgttctgtttcattgctctgtgtgtctgtttttatgccagtaccatgctgttttgcttacaatagctctgtagtataatttgaagtcaagtaatgtgattccttcagttttgttccttttgcttaggataactttggctattctgggtcttttgtggtgccatgtaacttttaggattcttttttctatttcccagaagaatgtcattggcattttgatagagattgcactgaaactgtagattgctttgtgtagtatggacattttaacaatattggattttatccatgaacatggaatatttttccttttttggcattctctttgatttatttcattagtgttttatagttttcattatagagatcttttgcttctttgggtaattcctaagaatttaattttatgtgtggctattgtaaatggaatttttaaaaatttcttttatttatttcacattgttctctgttggcatttagaaatgctactgatttttgtatgtagattttgtgtcctgcaactctactgaatttgggtatcagttctaatggtttcttgtggaatcttaaggtttttccaaatataagatcatatcatctgcagacaaggataatttgacttcttcctttacaatttggatgccttttatttctttctcttttctgattgctctagctaggacttccagtactatgttgaataacagtggtgacatcaggcatccttgtcatgttcccgatcttagaagaaaggctttcagtttttccccatgtagtatgatactacctgtgggtctgtcatttatggcttttaataaaagccatatgttgagatgtgttccttttatccccagtattttgagaatttttatcatgaaggatgttgaattttattaaatgctttttcagcatcaattgaaatcatcatatgatttttatctttcattctgttgatatgatgtatcacattgattgacttgaatattttgaatcatccttgcatcccagggataaatcccactttctgatgtaatgttgaattcagtttgctagtattttgttgaggatttttgcatcaatattcatcagaaatattggcctgtagttttctttttttgatgtgtctgtggttttggtatcagagtaatactggccttgtagaacaagtttggaagtattccctcctcctctgtcttttggaatagtttgagtagggttggtattagttcttctttaaatgtttggtagaattcagcagtgaagccatcaggtcctgggcttttctttactggaagattttttattatggctttaatcttgttacttgttattggtctgtttgggttttggatttttttgcctggttcaataatggtaggttgtatgtatctaggaatttgtccacttcttctagactttccaatatattgacatatagttgctcatagtagccactaatgatcctttgaacttttgcagtatcagttgcaatgtttcgtttttcatttatggttttatttggatcttctctctttttttctttgttagcctggctaaagatttgtctattttgtttgacttttcaagaaaccaactttttgttttattgatcttttgtatttttttcatttcaatttatttatttctgctctgatctttattattattttcttctactaattcttggcatatagaaatgctgctgatttttgggctatcatgaagattaagtctgatgtttctttgttgattttctatttgaagacctgtccagttctgaaagtggggtactgaagtctctagttattattgtattgaggcttatctctctctttggctctaataccatgtgctttatcttaatatatctgggtgctccagtgttgggtgcatatatatttaaagttcttatatcgtcttgctgaattgacccctttatcattatatagtgacctttttatatcttcttatagtttttgtcttgaaatctattttttctgatataagtatagcaactcctgccattttttgttttccattagcatagaatatcttcttccatccctttattttcaatctatgtggatctttatagtgaagtgtgtttcttgtaggcaacatataaatgagtcttgtttttttcatccattcacccagtctgtgtctttttgttgcagagtttagtccctttacattcattatatgtatgtatgtatgtatgtatgtatgtatgtatgtatgtatttattttgagactgagtttcactcttgtcacccaggctggagtgcaatggcacgatctcagctcactgcaacctctgcctgtcaggttcaagcaattatcttgcctcagcctttggagtggctgggattacaggcacacaccaccacgcctggttaatttttgtatttttagtagagatagggtttcaccatgtttgccaggcttgtctccaactcctgacctcccaggcaggtgacccgcccacctcagccttccaaagtgccgggattatacacattgagccaccgctcccggccaatgttattatttataagtaaggacttactcctccattttgttatttgttttctcgttgttttgttgtcttctcttccttctttcttttcttcctatcttcctctagcagaggtgattttctctggtgatacgttttagtttcttgctttttcttttttgtgtctccactgtgtgttgttttggtttgatattatcattttaacctcataacaacttaacaccaattgcataaacaaagagacaaaaagaaaactaataaaaactctataccttaactttatcccctggcattttaactttttattgtgtctatttatatcttattgtactcactatgccttgaaaagttatttcagttattatttttgattcgttcattgtttagtctttttacttagggtaagagtagtttacacaccacagttacactgttataatattctaggttttcctgtgtacttactattaccagtgagttttgtaccttcaggtgattatttattgctcattaatttttttttttttttttctgattgaagtactccttttagcatttcctgtaggacaggtctgctattggtgaaattctccagcttttgtttgtctgggaaagtctttatttctccttcatgtttaaaggatagttttgccagatacactattataagataaaagatttttccttcagcactttaaatatgtcatgccattctctcctagcctgtaaggtttccactgaaaagtctgctgccagatgttttggagctccattgtatgttatttatttctttccttttgctgcctttaggatcctttctttatccttgacctttgggagtttgattattaaatgccttgatgtagttttctttgcattaaatctccttggtgttctgtaaccttgttgtagttgtatattgatatctttctctaggtttgggaagttctctgttattatccctttaaatacattttctacccctatcttgtcctttattttctctttaaggccaataggccaattactgttttttttgtttttgttcttttttttttgagatggagtcttgctctattgccaggctggagtgcagtggtgttatctcagctcactgcaacctctgcctccctgattcaagcgattcttctgccttagcctcccaactagctgggattacaggcacccaccaccacacctggctaatttttgtattttttgtagagacggggtttcaccatgttggccaggatggtctcgatctcctgactctgtgatccacccacctcggcctcccaaagtgctgggattacaggcatgagccaccgcacccagcccaattactcttagatttacccttttaaggctattttatagatcctgtaggcaaggcataatttattgtggtttttttttttgtctcctcagactctgtattttcaaatagtctgtattcaagcttactaattcttacttctccttgatcagttcagctattaaaagactctgatacattcttcagtatgccaattgtgtttttcagctccagaatttctgcttgattctttttaattatttcattctctttgttaaatgtatctgataggattatgagttgcttctctgtgttatcatgaattttctttgtgttttcttagcacagctattttgaattctctgtctgaaaggtcacatagctctatttatccaggattggtccctggtgccttatttagttcatttgatgagatcatgttttcctggatggtgttgatgctagcagatgttctttggtgtctgggcattgaagagttgggtacttattttagtcttcactgtctgggcttatttgtagccatctttctcagaaaggctttctagatatttaacaggacttgggtattgtgatctaagctgtatctactttagggggaaccccaagcccagtaatgctgtggttcttgcagactcatagaggtgctgctttgatggtcttggacaagatctgtgataattctcttgattaccagacagagagtcttgttctcttctcttgctttctctttttttgtttttttttttttgttttttgttttttaagatggagtctcgctctgtcgccgaagctggagtgcagtggcgcgatctcagctcactgcaagctccgcctcctgggttcacgccattctcctgcctcagcctcccgagtagctgggactacaggcgcccaccactacgtctggctaatttttttgtattccttagtaaagacagggtttcactgctttagccaagatggtcttgatctcctgacttcatgatccgcccgcctcggcctcccagagtgctgggattacaggcgtgagccactgcgcccggctctcttgctttctcttaaacaaagagtttctctctctctgttctgagccacctaaagcttgaggtggagtgacacaagcacccctgtggccaccaccactatgactttgttgagtcagacatgaagccaacaaagggctgagtctcacccaagtcctgctgtaaccactccctggctactgcctatgttcactcaaggccctggggttttataatcagtaggtgataaaggcctgttttttccccttcagggcagtgaggtctgccaggctctctgggtaggtccagaggtgccatctgggggtcaggaactagagtcaaaagtcttagacatcaacctggtattgctgctgagctgacactcaaaacacaaaatacagtccttcccagttttctctcccctttccaaaggcagaggagcctcaccctgtaatcaccactaccccagaccatgaggagtactgccagactagccctgatgttcccttaaggcccaaaggctcttaagtcagcttgtagtgaatgccacctggtctgggactcacccttcagagcagtggacttcccactggcccagggcaggtccagaaatgccatccaagggtcaagtcctggaactggggaccccaagagcacacttggcattttggaccccagtagctgtgctggtacctgaagccagcatgtcccagagcctcacccaaggccctcgacgtggtacctggatattgctgctggttattcgtgacccaagggctcatcagttaacaggtgatgaatgctgctggcaccagctcctttctttcaaggcagtgggttcccttgtgggccagagtgtgtctagaaatgttgtctggtagctggggcctagaacagaggcctcacaattcagtctgttgccctttcctgctgtggctaagctagtatccaagatacaaaacaaagtcctccctactcctccatctcctctcctcaagtggaaggaaggggtcttttctggagctgagaactgtgcagcctgggattaggggagcagtgatgccagcactcccttgtctgtcccagctagtgtctcagtatgtcacgtgccctcccacccccagttcactgtctctgggcctagttcagcactaggactttcctaatagttgtagtccttatggcctagactgcctttcacattgacctggagactcagagtgctgtagccctctgtggcaaggtttgcaggcactcaagttccgaccacagggatctgcattccccctggcatgggcaggcatcagctgagtttggtctggttttcctttctgctgtaacaggacaacactgaatttaatgcctcacaattgctgtgttctccctcccctagtgcccagagatgctcttcgcccccagtaagggaggcgtggtgtcagcagattcaggacgggttttttttgtttttgtttttgtttttttaaatcacttcagtgcctctttcagggatatgaagtggaaatcaagtaccatgagtgctcacctgatttttggttcttaagaaggtgtttttcctatgtagattagctgttaacttggtgtccttgcggggtcgggggacgaacggtggagctttctattctaccatcttgtctgcatctcactagattatcttttaaaaactagatagtcattggctttcttctttcgctcagtctttctcttcaatatctactccactgctataagcatgttcttttacaatgaaaaatgtgaccatggcattcctgtgcttgaaactgtttagtaaatatcattgcccaaagaataaagcccaagccccttaatacttaaggctctccgcaacctggagacctcagctttatcttcatcactccatgcgcttgggactgcagcatctcacaccagactgactgtagttggacacgctccatggatttctccccgtcgccctgctcctttgatcgcctaggctgcaaatcgtctttccttcctcagtcccatctggtcaaatactcctcagttacggctcaactcagacatgacccttttataaagtcttttctgttacctggaaatgatctctgttatcaccctcatacccagtgggcatctttataacttcacagattttcatgttttataatgacctgggttttttttttttttgcctctctctctctgggctttaattgaaagccttctttccatcttagtaaagtttctggagaaagaagacactcattaagtatacactgattgacttgaatgaatatatgttggcaatggatatttttgccacattttgcaaatttgttaacacaatctgtaatttatacttcagagaaatatcaattgtaaacatgattagggtagtgcattttaatgaaaaggacaccagaagggtgttatgacattagttcaaatttatgtttttactatatgggatgtattaaaaatcacttcatttcttaagtgtattaaaaataacttgatttttccatgtttacacttgtaaaatataagacattgatccaggcaacacttagaagatgcatttggcctctgcatgtctttgaccttctggacattgattatgacctgactttgattactctgtttctaatttgtaattgttatgtgttgacagttataaacttataggtaattgatgtctgctcttttgaactaatcatgaatatattgttaggctgatttttaacctaagcataaagcatgtgtattatttctacttatgaagctaacatagtcaaatagaaacttctaaggtttttattgcacttatatgcaaatagttgtatctgaatgaaatcaccttaatgaaatgctgtctttgaaacctaattataacctctttattaacgaatgtagtaggggaaagaagtcatattaatgtcgttgataagttatgtttatccccttctgtcatcatattaactgagaatgaaatacatataaatagaaaaagtttaataataatggtatcagatgttaattgagcttactgtttgttagacaactcattttatatggaagaaagctgagacaagagaatttagccatggtcacagattaggtggcactagtttgaaaaatttaggaccttagagacatcattttcattccataactttcctttctcgtatgtgaagaagaattagccacctatttaatttctatctccatcaacaaaatatcagtaggatatgtgttgcttattggtaaggaatactggtgaggaataagaggctaaggtacaggtggagatgtttttaaaagtaattactaatgtataggagaagacacaaaatggatagtttatctgtttaagctttgtggtggccattgctttttatgtagcctctataactgaaagtctttaagagacaaggctttcccttttaccagtgattccaacaagataaatgcctcagctgggatgaattggggcttttcacaagtgacccgtagctttcttgtagaaatgcttctcagtttctttatgtagcacaattccagggacaaggtgaacctaaatgataactatgggctgtcttcctatatgtcagttacatccacaaatgggatgttaggggctggggaagggtgtgtgatgggatggcaggggctggggaaggctgtgtgtgtgtccatgtggtttttaaggttttgatagaacaaaaattttacctgcaaatcagcctagtggcctgtcgcagtctgtgtcatagtattatttacaaatagtcgtagttttcattctctctatagtgaatttcctggtaacacaaaaatgtttgagtttcaaaatgttcatacaacttaccaattgcctttttttttttttttttgagacggaatcttgctctgtcgcccaggcaggagtgcagtggcacgatcttggctcactacaagctccgcctcctgggttcacgccattctcctgcctcagcctcccaagtagctgggactacaggcacctggcaccatgcccagctaattttttgtattttttagtagagaagaggtttcaccaattgcctttttaaagtagaaaagttggctgggcgcggtggctcatgctgtaatcctagcacttcgggaggctgaggtgggcagatcacttgagctccggaacttgagaccagcctgggcaacatggcaaaactccatctctaccacaaatacaaaaattagctgggtgtgtggcacatacctgtggcacatcccaggtacagaggaggctgaggcagaagaatcgcttgagccttggaggcagagactgtgatgggctaagatcactccactgcactccagcctgagtgatagaatgagaccccatctaagaaattaaaaaaaaaaaagtagaaaattgctgggcacagtggctcatgcctgtaatcccagcactttgggaggctgaggcaggcagatcacctgaaatcgggagttcaagaccagcctgaccaacatggagaaaccccatctctactaaaaatacaaaattagccaggtgtggtggcgcatgcctgtaatcccagctacctgggaggctgaggcaggagaatcgcttgaacccaggaggcggaggttgcagtgagccgagatggcgccattgcactccagcctgggcaagaagagcgaaactccgtctcagaaaaaaaaaaaaaaaaagggaaaattaaagcatttgcttaaaagtcagtgaaaatatgtaaaataatatggggaatccggaatagtttgaagtaatgaaggctataacatgaatgccactttctttgagattcctgataatatacttgttagtaaagatgatggcataatagtcaccataaagaaaagtgattttttttatcatcaaatcaccaaataaaacctttgtcgtaaggagcagccatctaaagagtatatttaaaaggagagatatagatacttgtgtgtagatattaatatataggttctcaccatggtgattatgcctaagagtcaaaactttattttcttgtagggcaactgggcaaaaattacaagttttgctgctcttgaagcttcccccatgatctgattcttgagctgaaactcatgtaacaagagaagaatttggtaaagcctgatgcagtagcatctttgaggtggtcagaagaagccctatattgtcaaggatagatactgttgttaacagcaccatccgccgagcatagtggctcacgcctgtaatcccagcactctgggaggccgaggcaggtggatcacttgaggtcaggagttcgagaccagccaggccaacatggtgaaacctcatctctactaaaaatacaaaaattagctgggtgtgatggcgggcgcctgataatcccagctactcgggaggctgaggcataagaattacttgaacctgggaagtggaggttgtagtgagatcatgccactgcattccagcctgggagacagagcaagactctatctcaaaaaaacaaacaaacagaaaacagaaaacaaaaaaacaccaccatcattcagtgccttttatggtcaacgcctgaagagctggtgctgattacagattggggttcagggcaagaccacgtgggcacacccagtgaggccacagcaaagtgccctggggggaatggtgttgggactaggctcagggaagctggtggcatgaggaaggactctggcctctgactccagcgtgtttgttcgactaccaagcagcaatgactgtggggtggtgtattataacagctggcccagccagaatacaggggattaagtgtggcagttcatagcatttattatgaatttgaaaggccttcagaagtcttccaaactggagccttattggagatgttcacattgggcaaaaggaattgttcagctttctgttgtcctggcttctgtgctggcaacatcggggtttcctgagtatgggtagtaacacttgtcataaggtagaggtggtgcctttctgtacaatattgcttggatataaaagatacacatctaattgtttaaatgtattatcttttatctgctttatttcatcaaatggggcaggtgctcagtttcctttgtctgatatcctgtgaaggtagcatcaggagaatgactcatgccctgtgctgccttgccctctgctgggctggcttgagtcctcaggttccctcacagatgcaattcctgataataatcacttgcattctcctgttctaagctacagcttccttttctcttttttttttttttttttgagatggagtctcgctctgtcacctggttggagtgcagtggtgcaatctcggctcacagcaacctctgcttcccgggttcaggcgattctcctgcctcagcctcctgagtagctgggactacaggtgcacgccactgcatctggctaatttctgtatttttagtagagaaggggtttcactgtgttggttaggatgatctcgatctcctgatttcgtgatccccccgcctcggcctcccaaagtgctgggattacaggtgtgaaccactgcgcccggcattagctacagtttcaacatgatgcactagaggggaaaaaaaaagaaggcgtctgccaaactgacacacacacacacacacacacacacacacacacacacacacacacacacacacacacacaccagctgagtagttactgcttggtttcttctgcccgccttcagttgcctctgatcaaagctgttctcaacttgggtttccaaaacatttcgcagagagcttacaatggtaaataacttcttgtgcaacaggtttgagattttttccgagttataatatgtcttacttacctgtttctgcatgacaaatagtgacaaacttaggggcttcacacagtacggatgtattgcctgtttctgcagcaggagatcaggcccagctagctgcctccctgctttcagggtctgctctaagctgccatttccttctcactcaatcaagttatgttctccaatgttttctcacttttttttttttttttttgagatggagtttcgctcttgttgcccaggctggagccatttcggcacaccgcaacctccacctcccaggttcaagcgattctcctgcctcgccttcccaagtaactgggattacaggcatacaccaccacacccagctagtttttgtatttttagtagagactgggttttatcatgttggccaggctggcctcaagcttctgacctcaggtgatccacctgcctcggcctcccaaagtgctgggattacagccgtgagccaccggccttgaattcattctttagaaactttaattatgaaatgtcaatggaataatatttatagatgaaacttaaattttttttttgtatttttttcacacagtgtaacgctgacatcatttattgaaacatgacatatcttgagtgtatttaaaaaccaagagggtgagttatctcagcaacagtgtttttgttaaatgtagttgatacctattactgatgaaaagcaatagaaaagaaagcttctatttgggtaatgttttaagtttttctttacccaatggattagtgtaatttgctctctcattttcattaattttattgatgactgaaattgctcattactcaaaaagctggaatttttttaacttttaaatttggcatcctagtaaaatcttggttcaaagaatattttactggttgggttagaaatgaatccattttgtttaatatactttgaaatactattatcatgattgttaacatctattatattactctagacatgattttaaattcctccttctatatattcctctttgtataaatgcctccatatataatatatatagccattattgacttttgccagtcatttaccatgtgtttgcgttggggtatcacatactgacctgtgcaccaacctatgggcccttcctacttggttttttgttgcatgtggctgaaaagtctgttagaagcatagtccattgcgtataaaaggaactgaataagtgacttttgagttagatatataataggtgtagcacagaattcctcctttctataaagccccccaaataagtatatttcatcatttttcttgatagttgatacactctgcttttggaatttttcccacaatcacaaaccccattgttaaattctcagtctcattttagaacatttctgtggtgacctggccttggctgggtctttcgccttctctggaggccgtcccaatgtacgcctggctccggcaaggccatgagatgcttcctcctcaacaccagccaagctgccattcccatggctctagtaaaagcccctgatcttcatgccattgcgctgcgctgtgctccccccaccccgtgttgccactgtcatctgttaacctcctgccccccgccacctcactgaggatgtttatctgtcctgtctgccacccccagttctccaaattctgtccgttttcttttcttttttatttatttatttagagatggagttttgctcttgctgcccaggctggaatgcaatggggcgatctcggctcactgcaaactctgcctcccgagttcaagtgattctcctgcctcagcctcccaagtagctgggattacaggcattaccaccacgcccggctaattttgtatttttagtagaaatggggtttctcgatgttggtcaggctggtcatgaactcccgacctcaggtgatccgcccgcctcagcctcccaaagtgctgggattacaggcgtgagccactgcgcctggccattctgtccgttttcttggcaactcattatttacatgaatggtcccctcagtatcctgtatcttcattcattgatctgctcatcttcagtgacattttcttctactctattctcatcgaacactctcagtgtaacagagtcgaactagatgttacttcacctccaaaataacaaaatgaagcattcgcgtctccagcgacagctgcggtgcttgcagagcccttgctgtgttaacctccacgggagtccctcgccgctttctctccttccccagccctcctgccatgactcctgtctttatccacctgagattccaaagttcatcatttcactcatgttctttcagctgccttttccccactcacttttaccctttttttttttttttttttttttttttttttttttttttttttttttgagatggattcttgctctgttgcccatactggagtacagtgatgcaatctcgtctcactgcaacctccgcctccaagttcaagagattctcctgcctcagccttctgagtagctgagattacaggtgcccaccaccacgcccagttacccacacgctttttattgcacttcctgagcaaatgcatagctttaaatgactgtggtggtctgtgttttagtttctttcccttgaagctttagggtgtttttttttttttttggtagtaaacatttgggtaaaccgaggacactgtaagttcacatcagcagatggctcttccctccttgtcagtacccggtttcctgaggtatgagctcccactctctacagcaccccccctatatctatcccttgcttctaataagacctcccactcctcccaccctcccctgcctctttctttccggctgctcactttgccttatatgttactgcaatttaagaaggtgacaccaagagcactcactttcttgtcttccatttcttgagaaaaagcgtcctttctcctcttagatgcaaaggcctccacttgtgctggacacccacctctgcctcatcaaagaggttgttcctttggctggtcccctctctcctttattgtcttctctcatttccccaatgcacattgtgttgtaagagcgtctgcctcttaaagaacttacctggaccccactcacttcacttcttgccccattttcccttcccatttaatctttcctcccctgagacagcatcaccaacagctttgggcaatgccaagcccagttagatgctcctctcgtttgttcttacgcagcctctctccagcactgggcactgtggaccaccccctctggttgaaactctgctttcgtggcttctgagacctggtttttctcctacatctacgattctttctgcttagcgttttgagccttttctggcttgaacctgaacaacttctgaaggttgaaggtcctcagagcttggccccacgtcctctctatcttctccttgagttatattcccatggctttagaaaccatctatatgctaatgactcccaaatttatatctccagctcagctctcctctcagcactcccgtctcatttatccaaattacttacctgacaactccacgcggatgtttctcaaacatctgaaatgtaatatgttcaaaactaaactcttgctttttttcatggaaacttatttctccatgaatcttctccatctcagtgaatgacaactcattccacataattgccgaagtaaaaagacttgatggattttgattctgcacctcccacactcccacatccaatccatccacagaaatggttgatatacctccagagtacatcttccattgccaccgcgataacctgccggcaccttgctttgtctctcgccacccgctcatacagtgttcaaggtactcttattaaaacgtagatcggtcccttcactttcctgctaaaaccccgttttttccccctacattgcacttagcactttaagtcactctcctggccagtatagccatgactggcctggtctctgtctttgctgtccgactcacacctatggccaccaacgcctagtcacctgattttccatttgtgcaacaagccggatttgtgtactttgttcacagtgttccctttgtttggaatgtgttttccttctctcttctcatggctgtgttctttttattcaagtttctatctaaatctcatctctgatttatttctctaaccattttttctaggtaggatacctagttattcttgaccacagtatcagttttatttcctccctagcattttgtattttatagtgaacactttgtatatttgcttctgtattacctgtgtcttccactagactccaagtctcatcatcacacactgactgctgagcacatagtagggattaataattgttaatgaatgaataacttgatctgtcaatctccaaaacaaatgaaatattcaaggattgtggaggacaagagaagaaatggtctgtttcttcaagtagctcacaaatacatgttacaacgatgaggccggagcttctgtatgaacttactctgccctcaacagaaaccaaaccatcttctgggtggttcttacacaggtttctttgctttataaaaactcaaccatgtacttaggagttgtgtatgtttttatatatggttgcacctcaataaaacggcatatccaaaagaaaaaggaaaagggaaaaatgctaagaagtacttgcctaattttctgcaacaagactttatttttataatcaggaagactgacaacaattctctaagaacaaaagaaatctctgaataactgtatatttagagaaaaggagttattctcattatttgtttatgatattcttttgtagctcttatattgtaagtttataacactttaacgaacctccttaaattccatttaacttgttatggactggaaattgggtatagttttcagacgttggtctggtgggtgagatttatacctggtggaattagtacatagttttgggatttgtatgcccaagtacgtgttctctatcaaatttgctacttgggctgtttcactggcagacctgttaatagaatctcgtttgtatgtgtgtctcacagactactttgaagtgaggaatattcacgaaggcctattacaagcatcagatcactagatcactaagagagatgataagaagggtcttgaaattacatacagaagaaaatttgctgttatgcttagtcatacatacattctctgtttcaatcctagagatctgtcaggtgggtatgcgtaggatatgagcagccaccagccagccagatgcctcctagcaatagtcttctcaccaggacctgaagtcaatgtcattacctcacacgccactccagtgggctgcgtgacatggcaccgtcgcagcatgacacacagggaagtgtttctagtttccagaacatttctgaaacccacatcttccttctacatctttgtaagaacttaaatatggtgtgatgttattgcacatccaccagagacttgacgctttctgtttaaaacctaacatatgcttagatattaataaaatagactctagaaccaactcctctgaaatgggcctgtaacagatgctgtactgctcagaaactttaccaagtagctgtagagcccagcctcgcctggtgacttacatacccctaggagagtctttaaccaaagactgacaaggatgggggtgtttacttcagctcctccttctcccaactctcatcatctgcccatcccccaaacgggacaactctgagaagtgtctctagagttctcttgtagcaatgagccaaaataacccttcataagaatttacctaatgacacacccttgttgggcttccttcctttccctgtctagcccccagacgctctatttctttctcccttgggacagcccttcctaataattcacttccacttagtgtctgcttctaggaaatcctacctaagacaggcttcgttccacctaaaggccgaagctactgtgatattttacaatccttgacttttagctacatactcattattattatcattcttactttatcctttacactaccttgatcactggagtaaccttaacctatctgcacatagatctttattttctattgtgaaggtgatattattaggaaccaccaactgaaattttaccacctctataaaacaccagacaaacggtgagacatatttagcttcatcatccactgtgtggctttttctttttgttttacattaatccctattaaagagattattggctgggtgcggtggctcacgcctgcaatcccagcactttgggaggccgaggcagatgatcacctgagggcaggagttggagacagcctggccaacgtggtgaaacctcgtctctactaaaagtacaaaaattagccaggcatggtgtcatatgcctgtagtcccagctacttgggaggctgaggcaggagaatcacttgaactcaggaggcagcggttgcagtgagtcgagattgcaccactgcacttcagcctgggccacagagcaagactcggtcaaaaaaaaaaaaaaaaaaagattatcgcattctattactattagttttgtctttctacctcccctgctaggctgttatctactcaatggtagggctctgattttatccgtctttgcaaacgtgtgtagaaactaatcgctaataataaaagttaagtaaataaattcaaaattctagaagcacatcagtttgtccagagataacatgtcgagggtgctgttgacataatttttataatgtctgagaaatgataaccaatagcagaactaccaagcatttttctgtttctcaaaacaaacttcatagaaacctgtgttttggtcagtttgggcttctgtaacaaattaccatagacggcttataaacagcagaactgtatttctcacactgctggaggctggaagtcaggctggaagtcaggtgtccgcaagttctgggtttgaaggagggccgtcttctgggttgaagatggccgtcttctgggggtgtcctcacactgaggaaggaggcagagctagcttctgggatctctaatcccactcatgagggttctacccttgtgccctaataaccctccgaatgccctacctcctaataccatcatcttgggggggcaggatttcaacatataaatgtgaggggaagattgagtccataacagcctcagatggaacgatatgatgggaaatccctttacctcaaaggaccaagaattcccacctcctgtggaggataccctttaccttccttagtcagcaggaagataaggggagtgagcggaccagtgaaaaaagcacccgagagttatttacccaatgccatttctaaaatgtcaagttatttaacttgagatgattgccacaggaaataatccatgaaatagctcttggtctttttgaaattttgtgtcattattagactcgttcatcaagaaatttgcacctgagctcattgcagctcaagctcaaatggctttcaaatgaaaatgtcttttagcttaaataggaaggatagccatccttccaaaggaaatggacaattgtattaatgtctctttggtttgtattacaatccatctaactagtatttacaaacgaaatgaagcattatttgaatgtcagttgtttctagagagataaatgggattatgtgcttaattaggagaattcctgttcctgggtccagatttaagactgatctttgcgtttgatgttgaggcatgattttctctcaggaaatataggcagaaacctaagtatgcattcacatttttctgaatgtttaaaaaactatcagagagaggaccaggcacggtggctcacgcctgtaatttcagcgctttgggaggctgaggcaggcggatcatgaggtcaagagattgagatcatcctggccaacatggtgaaacccatctctactaaaaatacaaaaattagctgggcgtagtggcgtgcacctgtagtcctagctactcaggaggctgaggcaggagaatcacttgaacctgggaggtggaggttgcagtgagccaaaattgcgccactgcacacgagcctggtgacagagcgagactccgtctcaacaaaaacaaaaacaaaaacaaaaaactcagagaggaagtaggggccaccttccagtgtcaggagggaggttaatggtgtctcgatccctgctgactttgtgtccttggcacagcctaatgaggaatagtgggagaccagtggatgtgaggttcaaggcaacttcttatcggatcttggccctgttaataactgttggccaggcacggtggctcatgcctataatcccagcagtttgggaggctaaagtggatgtatctcctgaggtcaggagttcaagaccaccctggccaacatgttgaaacccccgtctctactaaaaatacaaaaattagcccattgtggtggtgtgtgcctgtaatcccagctacttgggaggctgaggcaggagaatcgcctgaacccaggaggcagaggttgcagtgagctgagattgtgccattgcactccagcctgggcaacaagagtgaaactccttctcaaaaaataatataataataataactaactgtgacattgggagcgctgcttaatttatctgggcttcatttatctcctctattaagtgggagaaagaattgctgcctacttcaatcgacgggtttttgtaaatatccaattaggtaaaagttctgaaagtcctttgaaataaataatacaaagaactatatggatgtaaaatattgttattttcaactttgataaaatttggctgtaacatgagaaacaagacttagtaaatcttgccatgccctcagtaaatgctgctagtgtaactaatttcgtatgtgacatatagatgataaacgaagagaggatttattatggttttgttgtagtttgttttgttcttctggtttattctagttcttggaagtagatggggaaaaattctgtaatgatgtgtaccagaaacataataggcaagactcattaaaccagaaagttcctgactggatctggcgtctgggaaattcagcatatgctaccagttgaatgttgtgattggcatatgtttggcatttgtcatatggagacacccgaagctctaagcaatagtagaatagcaagccccttggtggaaacaaatgaaaaatgtttcattattaacccaaggaaataaacctctgataaaacctatgaataatgcaaataaaggtatgtgagaaaaaaagtcagaatcaagggaaaagtgctgttttcctgatcagtgccttggttgtttggtggtggttgtttcagtctgacacactgactgtctttcaattaggcgtgtattttgcttctgttaggtgaaaggagacatcaagttaatgtaagaaatagtgtgtgttgggccaggcgcggtggctcacgcctgtaatcccagtattttgggaggccgaggagggtggatcacctgaggtcaggagttcgagaccatcctggccagcatggtgaaaccccatctcaactaaaaatacaaaaattagccgggcgtggtggcacactcctgtaatcccagctacttgggaagatgaggcaggagaatagcttgaacccaagagggggaggttgcagtgagccgagatcgcaccagggtgtcaagagtgaaactcagtcttaaaaaaaaaaaagagtttgtttcaaatggctaaattttccttggtcaaataacaaggtcaaaactgcacaccgacctggtgctgtagctcatgcctgtaatcccagcactttgggagaccgaggcaggcggatcacttgaggtcaagagttcgagaccagcctggccaacatggtaaaaccctgtttctactaaaaatacaaatttagctgggcctggtggcgcacgcctataatgccaggtacttgggagactggggcaggagcatcgcttgaacccaggaaacagaggttgcagtgagctgagatcacgccactgcactccagcctgagcaacagagtgagactctgtctcaaaaaaaaaaaaaaaaaaaaactgcatacacttttacatggtaattgcttttggctcaaatttaacttttataacttaagaaattaagataactgaataaccattgcttcttgtgtgccatagaagatatactgatagaatgaacagtgtagactcttaaattctattgatacttcttacctctaggaacaaccctgaactaagtcacctgttacatatcctaaattcttcagtcttgaagcaccatattcatttgctaattgcccacatcttttgttcccccaattaccaattcggaggagaaaatttttagacttattttctctattaatttttcctttgttagattataattatcaaacatgtttaaaagttgaagagaacaaagtgatataatctgtgattaattcaaacttaattattttagtgtcatctgacattaatttcctcggagtaataaatgttatataattttttaaaaatactattagaataccattaacataattataacttgaaatgttttcctcatatataaggaaggttaatatgaccgctgtatcaagcatgcttaaaatttaaataaccaaatgcctgatgggaattgggcaaattatatgtagccatggctgctctggcaagcaacttacttgcaccacctaaaatcctggtatgttttatttgccttttccgggaagtggagcaaatttctgtgtaattctggcagttcacagaaatcaagactggtatctcttcttgacaacttaagcctgatactggatggaataccaggacaattcagatattttttaaatttttttatttttattttctcagacggagtctcactctgttgcccaggctggagtgcagtggcgtgatcttggctcactgcaacctccgcctcctgggttcaagtgattttcctgcctcagcctcccaagtagctgggattacaggctcctgcctctacacccagctcattttttttgtatttttagtagagacagggtttcaccatgttggccaagctggtctccaactcctgacctcacgattcgtccacctcagcctcccaaagtgctgggattacaggtgtgagccaccatgcccagctgacaattcagattttaaaatgaacttgaggccgggcgcggtggctcacacctgtaatcccagcgctttgggaggctgaggtgggtggatcacctgaggtcaggagttggagaccagcctggccaacctggtgaaaccctgtctatactaaaaatacaaaaatatccaggcgtggtggcacatgcctgtaatcccagctactcaggaggccgaggcaggagaatggcttcaacccgggaggcggaggttgccgtgagtcgacatcgcgccactgctctccagcttgggtgacagagcgagactctgtctcaaaaaaaaaaaaaaaaaaaaaaatcaacaataaagtaaataaaaaataaaataaatgtgagatcgcataggagagaacattctgtgcatacatttaaagtgagaagataaaaatgcaagatcactgattatctggcaaagtaaataaatgacactgagatggatgaaattttaatacctacaactgcttctgtggtcactaaaagtctgcaacgtcaaataaagcttttctagtctcctgtgctgtataattaactttcattgtcacttaaataacataaacatccctttttcctggctgccccctcacatgacttagaatctctatttaattctgtgctatgagcattcctctgttgctgtgtaacatgattttgcagccaggtttgctcgtgtgggagtgctaaagactattagactcagtgcagtgatgttacctggcatctctgtgtgtcctcagggttgtgttattttatgagcatcttatatgcttatgtatccattatgtactgcctgttttatatgcatctatgtatttatccatgcaacaaaagttttccttggttagtttcttctcaacatttttgtccatgatcctcataaagtcataccacattcacagaaggtacaaatccgaaaaggagagctagtagagtacaagagataacagaagcaaaaatgaaatgattgcaataagctgcaagaagaattttgattttgctaaaccaaaattggacttacctgggatgaaagtaaaggtttcatagtcagaaacctttcagagggtccagggcctaggacggctctcttctcattggcccctttgctgggcctgcaccttgccatgtttttttgtttgtttagctttccaaaacatgactgtatgcaataacaggattgaggctatctattggcctgggcaggagttaagatgatgaaagctctaggactcagggttgaccacaagctcagggtcagccagcggtatgaagtacaggtataataatggtcttaggctgagttacttaaagtgtgacagggtctgagtaattacaagtattacagaactctctcctcctctacttaataaggagagctggtttgggggaaggtccttttgttttgccgagctgactggctgactggggaggcgaggaacttagaacacacttatacaaatttagaacaaaggctacctgggtttaggattgggctgggaagaggagattcctgaagagatgaaacagaggctgagggagggcctcggagggaaaaaagggaggaggaaagatgtgagcagctgctgtgaggggtggaactgggaggagaagtgggcgggaattttttgccgatgtgactgctctgggccaaggcgctaagattagccaagaagcctgggattatcaaggtgagttttctagattagcctatgtaatagtccaatcatattcttggcttaatatgtcaatctcaatttttggccctggtcctggcattaaaggacacagaaaaactagagttttcccagcagaggaaaattaggatactgtgttgttcggaaattgtgatcagagggacttctgactgaagtggacatgtttaatttagagaaagaaagaccaggggacaccaactgactgtcttcagttattagtggcactgtcactaggaaagagcagtcagtttgctcagtgttgcctcagagaagcagtcctggggggagtcgaccattgggtcagtaggaggaagaaccctcagaggggctggaggtgtccatcagtggttagggcactcggcggagcagtgagccccccgctacagaagcccaagcccaaccgagatgaccctctaccctctgttgggggtttgcgcgagtgctgtgctctgtgccccgggtggaggtggaggtggaggtgatggtcagtgtttgcttccaagtcagtagggaaggaattagtatctatgctatgtgctatatgccccatgcattgcacttattttctcacttaaatttctgagagacataatgttctctatgaatgaaggtttgggggctcaggcctattaagtcatttgctattcagtggtcaaatgatttgagcctcagatctgttttgctccaaaactagtgttcctcatgcatcacgctgtctctgataattaaccagcatctcaatattaagctctcttgtggaaatgccgtatgtaaaacatttatggcaagtatgtttcttatagatttaaggagcagtatattttagtggttaagacatgggtgttggattaatcagacataggttagagtctcaattctgcctgttaatagccctgtgactcttgggcaagtaacatctctgggctttggttaacccatacagtagttacctcacagggctattttaggattaaataaaataatgtagagagaatgcacctgatgtcagttgttttcattgctgcaatatttaatacctatctagacatcaaaggaaaagagatgaaatactaagtaatatccctaaaagaagcacttgaactgaaaatatttaggatcattggactacttctttgcacctgtaatccctgtcatctgaattctcttaccttccgcaacctgggaacttgggtatctgtaatatcacttctgcagtcaatatttgacttgaccttcaccttaacaaactcaccaaacacaacagccttgcgttttagtcaacccaagggcacaggaatcattagtcaaatcaatgaccaggatagtcataggacgcccatactcatagaattcaaccatttgtcagttacaagccaatcactgaatgtcagcaaagctcagaagatattggggccagactctcttgctagacaaaaactaagtggcttcgtttttaactcttatacttagggtattccttcttatcatctctctcctagttgtttaacgctaaacggctgcaaaatgatggctgcttgttgtagagggcagctgaccaaaaataaggaaatagaggagggatgccaaactatcagggattcagaaatgtgtttctgagaatgctctttgggccactctcagctgaactacctgcaaactaagaaatcttaatccctgggcctcaaacctactgaatcagaagtccagattgagaggcctggggattttcattttaacagtcaccttgggtgattggcttatgtttcttctgcaagaactccccagggccatccatcccagcagcagtagagtccagagcctaggatggcccttttctcactggcctctttgctggcccctggccctgtgcccctgcctttgccctccctgtctggatggctctccccagttatctgcatgatgcatgcctcaacttttaggccttcctgaaatgtcaccttatcttgaggccttcctgatcaccctatatgaaatgatgcaccacgcactcatcaccatcctaacagattgtgtggcttactcagcctcgtgtctgtctccccacatgagggcaagggttttggcagctttatacaccattgtactgcctgagcccagaacaacctctggcacctaggagggactccgtgtttgaaaaccctaaggaagaatcagggaagagaggcctccatcgtacagggagttgtgaaattgatgtgaggatttctgaatcctcacctctttctattctaatcctacattgcccttttaacttggattgtaatttaaaagtattaagatgtcaaaaatggtgaaaagtttagacatgtagacatcaatgactttagagattgttttctgtatagtgagaatgacacgtgacagatacttggacagatatgtccagaaattctaaggtctttagtatcatttttaatttttttttttttttttgagccagagtttcactcttgtcacccaggctggagtgcaatggcgcaatctcggctcactgcaacctctgcctcctgggttcaagtgattctcgtgcctcagcctccagagtagctgggattacaggcacccaccaccatgcccagctaatttttatatttttagtagaggcggggtttaaccatgttggccaggctggtctcgaactcctgacctcaggtgatcacctgcctcagcctccctgagtgctgggcttacggacatgagccaccacgcccagccagttaatatactcttataattttaacttggggaaactgagttgacttacattgtttcaacttttggcacctttttcaggattgtattctgcctacctatattattggggttgtaataaacattaatgggatctttgaatttatttaaattcatggccgggcatggtggcttaggaggctgaggcaggagaattgcttgaacccgtgaggcagagattgcagcgagctgagatcacaccattgcacttcagcctgtgtgacagagcaagactctatctcaaaaaataaaaaataaaaaataaaataaattcagctgggtgcagtggctcacgcctgtaatcccagcactttgggaggccaaggcgggtggatcacctgaggtcaggagttcgagagcagcttggccaacctggtgaaaccccgtctgtactaaaaatacaaaaattagctgggcatggtggtgggcgcctataatcccagctactcgggaggttgaggtaggagaaccacttgaacctggaggttgcagtgagctgagatcaggccattgcactctagcctgggcgacagagggagactccatctcaaaacaaaacaaaataaaataaattcgcaacaatttttttttgagaaataactctttaggtaggtgggaaattatgactgtggtatttctgatattttgggtttaatttacatcttttgcatgtgtctttataatctttcactgtttaatttgagagtttactaatcagcattaaatttcgcatagctgcaaaattcagtgtcagcagcccagtattttctctacgtagatgtgaatagggattttcttctgttattggggcactatcaggatctagttcctaaacaattaagctgcgattcaagcagcctacatttttttgtctgatgtttaatgcatttccatgagactcctggaatatgagtgtaaaacaaaggaatgtgtccctggtattcagatagtcgatgatgtaaatcctccaactgatgctgctgatctcttaatattttttcctgtagacaaagaagctgtaggtgcaatagagaggagaaaaaatgacaaggacatttgaaactgaaattaatcttagtataggagaaatggaaggcaaattgacatatcagggacatgaacaattatgaaatatcattggtcaggtttccaaatgctaatttacccatgtgtctaattttcttgatgagatgaaaattatagcatcccaattttcctttgagaaatgtttttctccagaaatatacaaatgttattttgcaattgtattcctatacattcattctcgttaattaaaaaaaaaatgtttacatggagaaacactcaatataaatacattttacagctctagccaaagccacagtcttaaggtattgttcattgtgttaatatgtcccctggtttctattttactgatgctcctgtttagaattaaggcgatccttcttcatgtgtcctcacagccctgctgtaattgacctggcaggccgccacattgtgggcccccacggtaatcacttggagaggacatcctgcctctctaatttgactgacaggacaagccctgttttaaaattgctgtcatgtgctttttatcagtaaataacacccatgctaccaagcatgtgtacactgaaatagacagctgtgtctttttaatgtgccttttccccagcagaggaaagtggctgaaaacaaccagagcttcatctggctgtaaaggtcctttctgctgacgacagtgctttttgaaatcttttctcacctctttacaagagagccatgtgcatactctgtagatcggttgatctcaagttaaataggctgacttcccacacgcggtcgttgcctcagagattctgtctggatttaatattttcagctatgagaaaatacaaaaacatggaatcagtctgggcaggactgactactggatgaatttctgcaccacatagcacaccaaactttctgccacttgtttttcatgaagacatgtaattttagtatgatgaataatgatggttttttaagttgtgttgcctttaggtatttagatacttcttttcttttttttaattttatttatttatttagagacagagtttggctctgtcacccaggctgcagtgcagtgacacaatctcagctcagtgcaacctcctcatcccaggttcaagctattctcctgcctcagtctcctttgtagcttggattacaggcctgtgccatcatgtcagctaatttttgtatttttggtagagcaggttttcaccatgttggccaggctggtctgaaactcctgacctcaagtgatccacccgccttggcctctcaaagtgctgggattacaggcgtgagccaccgcacccgccgaggtatttgggtatttccaactttgacttttgaaattatattttgctcttacatgaatttttatggaagagatatattcagttgagaagatgactatatttataccagtatcaaaacaaaacaataatgtcgtagctgtccactgggtgtttggggtaatgtagtttaagaagagaatccacaaatgtagacttaagagagaaggcaagcccttgaataaatcccacaatgaacctgatgacttgtgttttcaccaacacaagtcttcctataaatattaaagcatcccacatacacataagtgacaagggccttgggaagggaacagttgacatggagatggacactgctggtggagagaacaggagatgggaaagaggaaacatctacaggaagctgatgtagaaatagggacaggacaagattgcaggagtcatctatttcacacattctgtctgattctgtttgcctgcaatatagggtcccagaaaggggaacatggagacagaagtacagagacagggagatccctgccggcagattgccttggaggaggtggcagtgggaaagatgcgatcacacgtgcactgtggagagatcccccaggctgcagggaggaaactgtgggcctaaagtgggaagacagttcaagaccattatgccaggtgacagggaacacgaggaagaaacaggcataaaatataggtgatgcggaaacccctggcaactcactgggcctgagcaaagaagcgggaacatgtggtgatacttgttggaagctttaggctacggagtgaggtgctagtgagatggcagagtatgctctgtaggcattttgggaaatatgggattggatatagggtggaagggaaaacagagaaatttccgtgtattgattagctactgtgtgtcagatattttgctgtttaatagttttgaaagctccccaggtgactgtgatgtgcagccagggctagaaactgctgtcatctcagccttctctgtacctagttcaggcaactggagtttgaagccagccttctaagccttctctgggagatttatgagaatcttttcgaagtaaatttttaaaagttataaaatatctaatataattgttagaaaactctttaaaaacatacaattggtcaacaaccatctatttcttaaactttggtgtacatatatatgtatgcatatatgtatagacttacatatgttacatgtgatttggagaaagaaatcaatgcatctttgcatgctgtgttatacttcagcttttcctacagcatctttgaagtgctgtaattgaacataggcttcaaaaaaatgtgtttattcatatttcttgcagttctttaaaagtaaactcatgacactccacatatgaatgtcatggaccaagctgagcttgagcttttctgctcaggtagcagagaccttcatcattaaggaaactcactgacagcaaggcctagccataaagaagtttgccggtatcacagcatcgatggcaatgagaggagtaggtaggtaggtgagatagcacagtggaatccctacagacaagcagggaagatggctcgaaggagatgcagcaagaaacttcactttctctactgagttccatgtgttgtctttattttttttaaagcaggtgaccttaatacataactcagagctaaaatgacaccaggtacccaaaggaactggaaacattgtgagtagaagattatattggtctgtgcagaatacttccttagtcacaatgaaagcacattcttttgttctggacccttagaatagaaaataacaccttctgcttgtcatttttatgcatccagaaacacagattttcaacatcttatagtgaaggcattgctgagtgaagtatagcacacatgttttacagtagttcattatagtttgttagtaaagcagcatgactggaaataggctgaaaccattttagtgcaggagaaccacggctctttggtttggccttaagttgtaagcagaaagctttgggaacagtcctaccatcttcatggaacagtcagatgttgtacttgtcattgatgtttttgctatagtttgatgtgtaaataaggtacttaattgttgttggagagagaagtttaggagatggttttcagtacatcagaccagtgctgaccaggctcagaccaaattctttttttttttttttgagacagggtctcattctgtcacccaggttggagtgcagtggtgcgatcttggttcattgcaacctctgcctcccaggctcaagcaatcctcctactcagtctcctgagtagctgggattataggcatgtaccaccgtgcccggctaattttttctatttttggtaaaaagggagtttctccatgttgccaggctggtctcaaactcctgagctcaagagatctgcccacctcggcctcccaaagtgctgggattacaggcatgaggcagtgagcctggtcctcatgccatattttaactttgattctggaatgctagagaaatattattatttatgaatatggatgattgagtgggataaatacaaaacagtcatttgatttatatatatatagacacacacacaccatctattcatatataggaaatgggtactctgagagacagatgatcttgcatgaggtcattatatatgtgtgtattttcaggtatatatgtacatatatatgcatatatatgatgaagaaagacattggacaaaatattaagtattataataggaaccagggactctaaaagttatctgaactcaaactgagaactgtctaacaaggcaggaccagggcagatggggagactggagtttgcagaaaggtcccaacccattaggattggtagtccagccatcccctctgagctgcagaaagaccgagcaagtgatagcttggggaacatgaacacagccaactccgactggcactgctgtgaaggactctggtgagatatagatcttggagaccctgggcttccctttagccagcacctgttaagagttttttctcatacccccaggaagaggactggggatggaagaggactggggatggaagaggactggggatggaagaggactggggaaggaagagaactggggaaggaagactggtcattgaagaagtagtgttcttaggtaaggatgcttctcctctgatgggaaggcagggggtcaaggcagagtttagaaattgggccctgcctggtagctggcaggagtgctctctgtcctcatttgggaagcggaaagtgcacaggcaggaccttacagatgcagtctgcatggctcttctccacacagcctctactggagctgcaggcagctggaggggcagatctggtggaaacatgtttagcaattagccagaaagtggctcgggaaaggggcaacttgagtgcagttgtctgaggctggagatggtgtacattctataaatgtatgtgtagactaaatttactttggctgatttaattactccctgaagttttaaaatatattcagtcagtgtatattgaataactactctgtgcaaaaaataaagccatataaacttcaaggagtgtgcggtctaatgaagaaaatgaaacttgtaatcaagtgattacattgcaaagcaccgtgccaagttgtaaaagaactaccgtaaagaggcacagcatgctttcgatgttcaaagaagggaaaaagaaaagtaacttctcagtggaatcatgaaagggtcatggcagatggagtcctgagagatggggacagaggtaccagcaggaagaagcttctggaagtggagagacatgaagtagcttagagagtacgcctaccccggttcaactggagtagagctgtgggggaagacaaagacatcaacctgctagcgtaagatggcgaagaatcacataagatctgaacatcatgtcaagacatttgccttttcttcaataggcaactcctttttggtttgttttgcatgccccaaatattcaaagacttaggcagatgatgtatgactaacatctgggatttcatgatgtgggcctgtgtgaaatattttatgtacatttgtcttattaatcctccttcatatctcttttttttttttttttttgagatggagtctggctctgtcacccagtccagagtgcattggtgcaatctcggctcactgcaacctctgcctcctgggttcaagtgattctccagcctcagcctcccaagtaactgggattacagatgtgtgccactgtgtttggctaatttttgtatttttagtggagatggggttttaccatgttggccaggctgatctcgaactcctgacctcaggtgatccgcccgcctcggcctcccaaagtgttgggattacaggtgtgtgctcggcatatatctctttttataagatagaaaatacatgctcagacaaagtattttgggcaagatcactgagttggtaaagtgtaaaacccgcatttgaagccagcctgttttcactcatcccctttgtaatgcaccacattgcctctattgaagatggattttttgtctttttttgagacggagtctcactgtgtcacccaggcttgagtgcagtggtgcgatcttggctcactgcaacctccacctcctgggttcaaacaattctcctgtctcagctccccaagtagctgggattacaggcccctgccaccatgccctgctaacttttttttgtatttatagtagagacagggtttcactatgtcagccatgctggtctcgaactcctgacctcaactgacccacccaccttggcctcccaaagtgctgggattataggcgtgagccaccgcgcccagccataaatgtatttactttaaaactgattcacccagagaacaatagcattgtaactgggtaaaacatgagtgctcagtcttgagagactgtccttcctctgttgttgctgcttacaataatgggttggaattagctaagcagatacaagaatttgagagccacaggccttccctcattttaccaacattataaaatgtgaagcacgtcagtacagccgataagcacctagggccagaagatgtagtttaggttgtcagtgtttgggaactgacattgccaagacattattgcatcttttctgctttattaaaggcgacttagaatgatgacttccagttcctgcttctggcaacagtattgagtgctggctactgagtttacagtatccccccagggagagaaacagactttttcagtgacgtctacagtaggagaggtgtagctatttcctttgttccttgtacaaaacaccatactcagttttgcttccgatacagataagaaatctttgttcaatctagtctgtgttcagaatccagatttacactgaccttttgtgtggaagagatagattattttttatcacaagtggtttacatttcttattaattcagacggaagttaattcactcaacatttgtagggaacagagtgggcagggtgctaggacacagagataaaaacattagcaccctcgaggacatcttgagccattgagctttcagtcagacatcataaagactgagtaagaaatatcaaacctgagcacaaaaaagatactacccaagggactcttaaagtgcaagagatgaagcaaagataaaaccaagcccctgcctgtcagcccctggggggatgtgtaacgatgtgcactatgagatgtgtgctcacgtctccgtgatgtagacttagctctgtaaggtgacaggaatatgcttgtgtgcgtgcatatatcataagtgcatattttcactaatagcagtaaagatgtttgtggaaagctaggttgctagttttatagtccataaaagcagctcttgggagtctagggacatacttggatttgtgctatctggagagaggagttggggggagataccttaaaaacacaattcaggggaaacttcttccatttgggtaaataggggaaatatattttgctgtaggccaaagtgaagatgtggttgacgctaagaacctgtcgttgccttaggtgctgttgtaaagaatgttagaaggtttacaacactgtggccaaatgtagataaagtaagttttgttacattttttttttttttttttggagtcagagtctggctgtgttgcccagactggagtgcagtggcacaatctcggctcactgcagcctctgcctcctgggttcaagtgaaaccacctttgcaaaattatgacttagacagtttatcaagattgtaacatccctttcccaaagcagacctccttcttgcctggggactagattgcctttgtaggactaccattagcgacaagattagaaattacggtttaggagtcatgcagctggagcctacaagattctgaccctccctaaactgcctctaagatcagtgcttgagatatttgcagaccctgcacttgatggatcagctggccccacccagatggattaactggcttatctgatcttgtgctcccacctaggaactgactgaatgcaggaagacagctccgggtcctatgatttcatctctggccaatcagcactcctggctcactggcttccccccacccaccaagttatccttaaacactctgctccctgaatgcttggggagactgatttgagtaattataaaactcaggtctcccgcacagccggctctgcgtgaattactctttctctattgcaattccgcaattcccctgttgtgatgaatcggctctgtctaggcagcgagcaaggtgaaccccttgacggttacacaagagattctcctgcctcagcctcccgagtagctgggattacaggcatgtaccaccacccccagctaatttttgtatgtttagtagagatggggtttggccaggctgctctgaaactactgacctcaggtgatccacccacctcggtttcccaaagtgctgggattacaggcgtgaaccaccacgcctggcctgtacatttttttttttttttttttttggagatggagtcttgctctgttacccaggccggagtgcagtggtgtgatcttggtttactgcaatctccgcctcccgggttcaagcaattctcctgcctcaggctaccaagtaactgggaccacaggcacacgcggccatgccctgctaattatttgtattttagtagagacagggtttcaccatgttgcacaggctggtctcaaattcctgagctcaggcattccacccacctcggcttcccaaagtaccaggattatgggcgtgagccactgcgccaggcttatactttttaacttacttttctttaaattttaggatgcgagtctctgtcatttgaattgagaacatatattccattaaacatgctgctaatagcgatccctcatgcatgacttggacttcataagacgctttccagtgcttttctcactgcattctcacagcaaccctaagtggtagatgtatttctgctcccagggaggcagactgtgttcttcattctgcagacgaggaaactgagactggagatttaaatattcacccaaggaaatggctggtaatggtgggtctcggactttaacccggaacttctcacttcagattctttgtctttcaactaggccacactgttttatggcagtctgtttaatttcaatgtggctttgacttctgactatgagccattaagcggcagttctctaaatctagcccctaagtgagtcttcaaagtctaacctgagtacccagctgcctacagcaagttttcactcagctattcctcaagtgatacaaatgaagataattctccgccccatcccacttccatttccaggcaaatccatcttggatgctaatcatgttaactaataattaactcctgggaatgcctctacttttttactttttttttttttttttattgagactgagttagtttcgctcttgttgcccaggctggagtgcaatggcgtgatcttggctcactgcaacctccacctcccaggttcaagcaattctcccacctcagcctcctgagtagctgggattacagacatgtgccatcacgcccggctaattttgtatttgtagtagagacgggggtttctccatgttggtaaggatggtcttgaactcccgacctcgggtgatctgcctgcctcggcctcccaaagtgctgggattacaggcatgagccaccacgcccagcttaagatttttactttatctactgttgctataaatcctggccttaggtcaaaacaaccttgaccataaaccctgcccttacataggttgatgtagcattcttgcctttccctagggatggacttcagttgtcctacacattcctttcctagggtatataagccctgggtgtggtgggtagcagcacaggaatccactatctggcctcactgctgcctgagacatggcttctgtccgtaagtccctattaaatgtttcttttcgagagactggatgggtcagctcagcttcctcgaacttggcgggtgggttgcatagacctgcctgctgcagaacacagaggtgtttgggccatctttctatacattttaagaaactcagaatgaatgaatattaagaactttcatagtatatcgtctttataattttccattgtaatatcaatattctgttttggcaggggaatttggagagtgtggaggagaaaaagaaatttagaatatataggcatgcttttctagttcccttcaggtgtaaggatattttaaatgtaatgaataattgtaactattgaatgaagtatttttatacattcattcccaactactaatttttttcccatcaagttagaattaaactaatcagtataaatgtatcactaaaaaaagctaagtatggaccggcacagtggctcatgccagtaatcccaacacttgaggagaccgaggtgggcagattgcttgaggacaggaattcgagaccagccaggccaacatggtgaaaccccatctctactgaaaatacaaaaattagctcggtgtgatggtgcatgacagtccagcttcttgggaggctaaggcactagaattgcttgaacccaggaggtggaggttgcagtgagccgagatcacgccactgcactccagcctgggcgacacatcaagactccgtctccaaaaaaaataaataagtaaaaagctgagaaagctgagtatggtgctgttactctcttctaggtttttgttttgttttgttttgttttgttttaattagagacaggatctcactctgtcatccaggctggagttcagtggcgctgtgggatcatagttcactgtaacctcaaacttcaggactcgtagaatcaatctgactgcctcagccttgccaccgtgccccatcttctaggttattttacttccttttcatatcaactctttgcatttaattagtaatgtcttagcttccagacagtatcttttctgtggtgttgcgtacatgatactttaaatttacactaaataagacaatactaaccttcaaggagaagttaaaatattttgtgaatagaatcttctaagtaatttatatcttggcttgaatgcagtttaatgactattttctgtaaattatgtaactattatttatatttatttcttactgatctttgctcttctattataacttgtcttgagtcctgccttgtacttcctgtttggtttatctgagtaaatttttttttttttcttttgagacggagtttcacttcacccaggctggagtgcagaggtacaatctcggctcactgcaacctccacctcccgggttcaagcgattctcctgcctcagcctcccaagtagctgggattacaggcacccaccaccacgcctggctaattttttgtatttttagtagaaacagggtttcaccgtgttagccaggctggtcttgaagtcctgacctcaggtgacccgccgccccgcacccctcccgcccccccgccctcccccgacctcccaaagtgctgggattacaatcatgagccaccacacctggccctgagtaaatattaaattcagttgattgttcctgaagactgagctgtctctttgggccatgcctctgagattggtggtggaaggaggcccaggctggatccagcagaaccagccattgtcacttgttaatgtggccttgggcaggtggcttaactgtaatgtcctaattctccttcccagggtggatatgagattaaaaggagcgactgtatgtaaagcgcctgatgggaagaaagtgctgatgagagctatattgctttctcctattccctcctcactccttttaaaaattaaaacacacatggaccatgtctacatgtactgagcctttgttaaagttagtatttatcagctgatagcagatttgttttttattcgatcagttttaaccagtcgtaacgaagaaactggtttgacctttatacgtgacccagttagtaaactgttcatctagaaacctagaaacctatatgctgatagttctagttgaataattcttgttaattttatttaccaaagaaccagagatttatattcccagtatgaagtgattttcacttagataattttttattcaacctttgtaactattttattttgtggaaaaaaaaatcctcgaatgtacttattttggattttcctgttggtgaaaacggtttttgcataccttcgaagactgttatgtgcgaatttaaaatgcagattagctctatcatacactcactgtaactatgcgtcttgcttgtcggtcttgctctgagctgtggatactcagttatgttttatcccggtttcagatcagaaacagtgctcatccttgctagaaactgccctctgaagcaaagttcaagttctcagggagagagccaatcaccctggctcctcctaccttcgattaagcagagaacaagccttagtatatgcaaatgtgagctttgttttgtagagtaaatcctgtttatttgtgttgtgggctttgtttttatttttttatcttgttttctctcttagaaaagctcaagcctcacacaggttattttcccctggtgcttgatggtctacacagtttcatttcatcatgtcatacttagggagtgacccatctttcaatgtgtcttaaagggctaacctaggaattattagccacgtgccatacatcaacaaggtacactttgatagactttttattgcttaagtccacagcttctgaaaatctaatcctctgtgttttcctctgtctccaggcctctctgggcctgttgttattctcttatgcagcttttctttttcttccatctagctatcttctaccaggctatgggctggacttttattactttggtccagaggtcacagctctggtttaatccacaaaccttcagtacttttttttttttttaaagcgcgatctcggctcactgcaacctccgcctcccgggttcaaatgattctcctgcctcagcctcctgagtagctgggactgcaggcatgcgccaccaggcccggctagtttttgtatttttagtagagatgggtttttactatgttggccaggctggagttgaacttctgacctcatgatctgcccgcctcggcctcccaaagtgctgggattacaggcgtgacccaccgtgcccggccacctttggttcatttttaagcttttgactgttttctgatttttttttttttttacttctaatgataccaagtattttgtagtagttgtttttttttttcccttagccttgtggaggttctgcattatagttcttataactaatttctatttaattatttttaccttgactccgatagtttgtcatctacattttatttcatgaacagaatgttaaaataaattaaaaggctgggtgcagtggctcatgcctgtaatccctgcactttgggaggccaaggcaggcggatcgcttgagcctcagaaattttgaccaacctaggcaacatagtgaaaccccagctttacaagaaatataaaaattagctgggtgtggttttgcacctgtagtctgaagctgagaggtgggagaatcacctgagcctgggaggtcggggctgcagtgggccgtgattgcaccattgcactccagcctgggcaatggagtgagaccctgtctccaaagaataataataaattaacaatttaaaaataaatagtgaatcatatgttttacagcttagcgatttaaccgatgacatctcattcatttgacaaccttgtggagaagagtcattcatttatttattccacagatttttttaagcattactacatgccagacactatactggatcctaaaaatatgaagtgaacaaaattggccaaaatctctgactcgtggggctgcatttaattaaggaaggaagagaacacacagtcgttaaatagtgtattggccataagtgctaaggagaaatgtaaggcagaatgggaaattggaattgtgggagggagtcgaggagatggagccaatttctgactttagatgaggccacgcctcacggggcaggtgggatttggatcaagcctggcctctctgagggagtgagcgatgtggccagcctgggcccagcatttcagggggaggaaagaagtacagaggcccttcaggctcaggggaggttgggtgggaggaccgggcagcaggaaggcccgtgagtctggagtgagctgaacccaggggacagcagctggagatgaagtcagagagcacctggcaagaggttattgttcctcttttacagagagaacaaatacacacacacagagggtcagagtggtcttggtggagggagttcctcagggtcacagagctagaaaggggcagagctaggactaagcaggactaactggcgcttggagcccaggtgtgggctggggcctcccactcaggtgtcatccttgatcgaagtagttgacattttatttctcactttgctcatcttcctgtctttggagagtaggaaagcatatttgtttctggaattctctgaggaaagatcagtcacttacattttaacctccattttgaagaatcagtgatatttcacatggaaaagtgtacatggggccagtatacatcacatagttttgacttcagtcttataaccttgggagagtttggaacacaagaattctttttagaggacacaaaaaccttcataaaatgattatactgtctgcttaaaagagaagttctactaaaaatttggaaagcagtttttgatgtagtatcaaaaagtgggttgttttagtttgcaaacttacctcaaactagttagtcttcctaagctagccctttaagtcactgcagttccatagtttaggtgctggtaaatgaattgtatgtagctaagacaatgcatcagttgtttttgactttgtaaagaattcacataaaaatgaaagttgctcaagagaagagaattatggatgaatacaccctaaagtaaattgctcttctccaaaccaaggtccatgcattatattttatagaattcacagactgttgttaccatgacaggtcactcttagtccttgaacaattttctcacccaagactattaccaaaatcagaattatcaacagtctgaagtaattccaaggccaataaataaataaaatgactcctccaaatgataagaattctctttcaacacagagacgtttattaaaagtgcaatcccagatgcttgttgaatatttattggatgtggtcatcctgaagcaggacgccttaggtatattgtagcataaaatatgttgattaaaaatatccagggttacaatagctcctacacagaaaatcaaattttagggctaaaagatttttaaattcactaataatgtgattttagtacttcataagcatatttgtttttcatttaatcctcaaaagaaccataggatatagggttgttaaccccatttctttttttttaaacatctgagttataacgggggcacagaaaggttaagtaacttctccaaggtcaccagcaaagcccgtattctggatttgctttgaaatctagccgttgtgcttattcacactcacactatccttactcttccttttctttatccttatagttttgatcctcataattttttgttttttaaacataatttctttttagagatggggtggtgctatgttgcccaggctggtcttgaactcctagcctgaagcaatcctcccacctcagcctcccgaagtgctgggattatacgcatgagccactatgcccagccaaacttcatagattttttgaccccataaacaaatctgttgtaataaccaatggattttttcttttttctttttgagacagtcttactctgtcacccaggctggaatacagtggtgcgatctcagctcactgcaacctctgcctctgggtttaagtgattctcatgcctcagcctcccaagtagctgggattacaggtgtgcgccaccacacccagctaatttttgtatttttagtagagacggagtttcaccatgttggccaggctggtctcagaaactcctgacctcaggtgatccacccacttcggcctcccaaagagctgggattataggcatgagccactgtacctagcccaatggagtttttctttcttggtttcttttatactatttctactttccatcgcttccattgagactttcagctcgtcacatctaatatctaaacaacaagccatgaactcatctccttgtccttggtctcccttgactcccactgtcctgtgaattcccactctcctgtgaattcccactgcctcatctgtaatttcgtcatcaagagtcattcctaatttgatgaattctaaattgctcctctgatcactttataagcactcaacttaggtaacagcagaaatggagaggagggaacacagttgagccattgggctttagagcttcttggatgtgactgtatcaggaaggcatgagccatgactccaaggtttcgatgctggtaatagaatcaacagaaaatagaagaggaaggaaaatttgaggagcaagagttgattggggttatttgctggaatggtcagggttgaaggtaaatcatttacatttttcaaggctctatggtccaactgaaatgccttctttttgttgttgtttagtctgaagttataactctgtaaacattgattttttttttttttctgatcagttcatctgactcacagtgttataggacagaggactatttattgtgtaacagatgtagtacttctggttagtgttagaaagactttagagcatgggagaaaaacccagtgatgttgttaggtgtgtctcacctaatagctcttggagtaaggtgttcacctgccccatcatggtttgtgctgaccagcagcctacgtagcaaattcattggaatgggtgacttaaaacaaaacttgctcactttattagaaacagtttaacaaagcaaacaaaagccaaatattctttaatctgctttatcatgatggtatagaccaatagccattgttgtgtttactgttgactagtgtcatcaaaatcaaattgtaaggctgggtgcagtggctcacgccactaatcccagcactttgggaggccgaggcgggcgaatcactgaagctcacaagttcgagaccagcctgggcaccatggcaaaaccccatctctacaaaaaatacaaaaattagccgggcatggttgtctgagcctgtagtcccagctacttgggaggctgagtttggaggatggcttgagcctgggaggcagaggttgcagtcagcagagattgccccactacactctagcctgggtgatagagccagagcttgtctcaaaaaaacaaaataaaataaaattgtaattgatcatacaagtattaatattctagcactaaataattcttactcaaagaaaactatcaggttgaggataataagcattaactggggacatcgaataaaaagtgagttacatctttataagtaatctcactaagtgtttcttagtttgatattccattgcgtcaaacctcctatgatttgaaaacaataatactgagtcaaaataaagatgttaaattaaaattctattcatgcttacttgcccctaatatttatgatcaatttgcttaggttttcttaatcttttattaagtaagctgtgattttttaacaatttgaaccatataatattttgtgcttaaaccatattccttaaacagtaagtatttggttgacaaaactataaatatacactataaatacatataatacatacattatatatatgtacgttatacacatacacacatatataatatgcttataatgtaaatatatggaattactatatggagtttgtgtgtgtatagaatagtaatatgttttttccaacaaactgagttttttaacatcgtgtgtccaagaaggggttataatacatttaagctctgctagtttttcttctaaagaccaaaatggatgtaatcatgaggaatatatgtttaagttttcacagtagtttgaataagccatggtgaaatatttaaggttatccagagggagaaaagcaccctttagtttatagacaattaaatttaaatgcagccataacttacaaggataaatttgaaccatccatcctttgctttactagctagagtctgccctctcatgttggcagttctttacaaagaagagaggatttcatgtgcttgcttatagttttggaaaatgtgatgagtttaatgatgtatttttcatttgtgaaatgagtgtagatagaaatcaaaatgatgaatagaagatgtgagtgatagtgacaattctgattgaaatgacagtgagaatgcaaaaatgaaatcaattttctatttaaattattacagcagcattcattaaggccctttcttaaatagagctggatattgcaaactggaaaaaaatattaatcatggatttgccctagatttttctgcattagtctggcatgaatgtttatatttaagctgcaaatagtagttttctaggtattcagaagttaagaacaatttagattaaggatgtttaaagctcatttgtaaaatgctcatactatttgagctgttttaaaaagatttgcttagcgaaagtcattggatcagaataattctgacactcttaatctttttttttttaaactaagggccttagacattttctttccatttaaaaatttgaatgacaaaaccaagtaagtaattacttgaaatagtgaagtaaataccaaatttgtgcccagggaagaaaatacactaaatcttaaggaacacagaggcaattgtaagacaatacagtctctcttgcccatctttgtgtttgaacagattttgtaaattcattggtttgtaataatatttggcaagaggttcagaagtagtgatgtagcagccagttgtaaatagagaataaatttcacaggctaaatgattatgagtgaccaagagaatagcagcacttgggcaagagggaactggtggacagagaggagttgggaggggagatctgagatgctacaaacaaacagcaaaagaaaaatgtttccctgaattcatctcaatgctaaattatgtcaagtcaccatttacaatgcttagagttcattataagtgctactgatttttagtgcaactggttcttatactaaaaacatcagctaataaaatgaaatttatgttaattttttaaactaaaatagtagccagtgaagtgtaccatagtgtagatgtcttagaaatgtctgattcttctttggaaggtaaatgatcagtggctttcattaactgatttgcaaatccaaaaatgtgttcttccacactaagccatatttaaaaatatatatatatttttgtagagatgagggtctcactatgttgtccaggctggtctcaaactcctggtctcaagcagtcctcctgccttggccttccaaagcattgggattacaggcatgagccactgtgctcaaccatcagccgtattttttaacatgagtgaatatattttgatatcttcaattattttattgattcacagaatgcaatttgtgaatcatgaatgaatctaaatcatgaatagtttttagatttccttcatatatgaaattacagcaaaaacaatgtaaaatcctttaaaacataggatctcttcttcttacccaaggaagacagtttatttcctgagtccatttggtcatgggttaagcatcagatatattaaaaataaatgcatttggactaagtgccatttattcagtgggaaatagaataaatgagatgggtttgtttcatgtgggcctctttatttataattccatggcctcagaaagaagtcagtattatatcagtctgaactatgtttatgcatacacacacatacaaaatctcacatatgttaatatcaaaactattaataatacattatcacttcatctaagcatcacctaagaatagggcctgtttctcaaagtgtttgtggctggggcacctcctgaccacacaaagcccaaaataaagctatccaagagccctcataggctaatactagtaactggcccagagccctgaatgctcaattgatttgacacactagcgctcaagctacctttggaacatggaaggcagcacagagccttaattcgctggcatctgtactccgacagcatgcctactcttgtactagtttaagttattccgtattttaaatgagtcacttcgtaaatactgaccctcccttattgccagtaggtttttgtttgtttgttttttgagacggagtttcgctcttgttgcccaggctggagtgcaatggtgcgatctcggttcactgcaacttccgcctcccgggttcaagcgattctcctgcctcagcctcccaagtagctgggactacaggcatgcgtcaccacacctggttaatttttatattttcctaaagtgctaggattaaaggcatgagcccccgagccagtaagttttaaatgaggcatagctgaaagtccatgctatgaaggcagaatttaaaacatgaaataacgtaagtaacaatggtgctttgtgaaactactccatgtgtagtatacacatacatggcaaatttagtaatttctttgttgtgatgaagtgttgtgaataattcaaattatgtagctgtgttttctagggtactaaacttacatgtctatgtcttgtgagtttagagttagaatgaaacatgctaaatgcaatagttactattagaggactatttgcttctcattatttaaatttgctggccgggtattgtggctccctcctgcagtctcagcagtttggtatcccaaggtgggcggatcacttgaggtcaggagttcgagaccagcctggccaacatggtaaaaccctgtctctactacaaaaacaaaaattagccatacgtggtggcacccgcccgtaataccagctaactcaggaggctgaggcacgagaatcacttgaacctgggaggcagaggttgcagtgagccgagattgcgccacagcactccaacctgggcagcagttgagattctgtctcaaaaaatatatcaataaatatgctaacctactgttaaataattataaatagcagtgaggtaaatgtatgcatttgtgtgtacataagtgtggatgtctgtgtgtgtatatagaactacttaatgtaatgataagtgcttatattaatgttacattttaattttctattattttgttaatgaaaattcttgtaatttttatgtagtaagactgttaactgattagctcaccatgtgagtgttccataaatgtgttgttttatcttctcaaactaatgaatagtctgtttcatggagaatgcattgtaagctcttgacctatgaaaacaagtttttaaaacaactaccacacatttttcacagttgtgcataaacttagttttatcacttttactaattgtattcacttatagcatccagctaagtgtattaataaataaatggctctgtttaaaatgacaattgaggaaagaataactaccgtacatttttttcatggtatacataaatctattcataactacagcttctactattaaagtctaaaagattgttggttaatataatatatgatgtagacaatttttgagataacataaaacccagtttttttgtccattttagtttaccagaatgattccttcattcagttttttaaattcaatgccaaaatcacataagaacatgtagtaggcatggtgcttgccaggctcttgaactaagattagtgtaagattattttatcaaggacgcaatgatctagttcactggttctcaggctttgctgctcgatggaataatttttaatttagggaattaaaaaaatatattggccgggcgcagtcgctcacgcctgtaatcccagcactttgggaggccgaagtgggcagatcacaaggtcaggagatcgagaccatcctggctaacgtggtgaaaccccgtctctactaaaaatacaaaaaaaaaaacaaattagtcgggcctggtggcgggtgcctgtagtcccagctactccggcggctgaggcaagagaatggcttgaacccgggagacagaccttgcagtgagccgagattgtgtcactgcactccagcctgggcgacagagcgggactccgtctcaaaaaaaaaaaaaaaatgcctgggttctaccccagccctcccccaccccaccccgagagattctgatttaactgctttgggatgcagcttggacatcaagagttttaaagctccccacaagagtctaaaatgcagcaatttgtataaactgttgatgtaagccaggaagatatctgtattcttgagagcctccttggcatcccctccatccttaaccttgccattaaggaggaattacctcctgttttcactgcatttccaccataggacattctcttttatccatttatttacacttctgcctcactttttagatagtcactgccttgcttactcctcaagggcaagtgtatatctgagcaatttctttaactactatgctcagcagaattccagctatatagtaggcatcaaataaatgtcattcactgaatgcaagtgaggaatgtttcaataagaaatgtttcttttttcttttcttttctttcttttttttttttttcatggtagagtctcgctctgttgccccggctggagtgcagtggcgccatctcggctcactgcaagctccacctcccgaactcaagtgattctcatgccacaacctcctgagtagcctcctgagtagctgggattataggctgcaccaccatgctcagctaatttttgtatttttagtagagacagtgtttcaccatgttggccagcctggtcttgaactcctgacctcaagtgatccgcccacctcggcctcccaaagtgctgggattactggcgtgagccaccacacctggccagaaatgttttcaaataatataatataaccgagtagtgatacaggaatctagctaagtctgatgtaagagactactgttctgtccagtggaagtgggtgggacttaatctgcttcattggataggtgtgcagatgtgtatggtgcaacatctggggccacagcaaggcactcagcagaggagttagggagaaggagctgggagttcaagggtagtgggataagtggacacctggccagatggcagatattgaactttcatgcaagattacattgagttgagggaccacacgtcaaagatgaattcagtcatcagctgtgaaggagggaaggatcagagaaggatcagagagaacatgcagtgcaaagacggaactggcgactgggagggagggctgccctcaggcacagcaatcgctgcattagcgcaaagaagcagcttactggggtaagaaacaccctccactgctaagtttccgcaggaacaagtggtaccaaacagctgcattttaattgatacttcagggcgttcctgggactcctcttatagagaccctttttgacagtcacatgcggccctagcctattagtagtacagacatagctcctttaggaactttctagtacttttcaggaagaaagaagaactcagtcttctttatcccctagggtcaagggctcccagagagtttgtttatttgtttaataactccatgaacagaaaagaacatttagacataattagagatgggggataggaagagaaagctgattcaagtaaaaaaaaaaatttgaataagtaaaaccagaatctacaatgtacccgataaccaactcatttcaaagactgttgcttttcttaacattgaagttagaaattagttttaccaatacttaccaatactttgccaatacttatattaccaacacttacatctaccaatacttatataccctttcttgattatcaactttatatttcttctgattttatgagcatattaacatgactatatggctttttatttctaaaatacttactaatataatttgaattctcccaaaccattagaagtaacaataagttgtcaccaggtgcggtggctcatgcctataatcccaccactctggaaggctgaggcaggcggatcacctgaggtcaggagttcaagaccagcctggccaacatggtgaaatcccgtttctactaaaaatacaaaaattagctgggcgtggtagtgcatgcttgtaatcccaggtactcaggaggctgagacaggagaatcactttaacctgggaggtggaggttgcagtgatccgagattacaccattgcactccagtctgggtgacaagagtgaaactccatctcaaaaaaaaaaaaaaagtaaaaatagttgtcaaaggcctcctaaataggatattcaataccatgcttttaaattttaaatataggagagtctctagttgtctagaataattccttttttttgtatatcactcttgcaattttgcaattttaaacatcaatctaatgtctgcaatataatattacaaatcagaaatactttctattaaccacttatactacatgaatagatttaattaaagaaaaattatagttttagtctaattttagtctaaaatatagtctcatttttgatggttttagtcatcaggactgaaaagtttttgttttttcttttatagagatgggtctcactctgctgcccaggctggtctcatactcctgggcttaagtgatcctcccatcttggcctcccaaagtgctgggattataggcatgaaccaccatgcctggccagaactgagaactcttgttctgtatattctcctcctgtgcaatactggcatttatctttttgtgctgtgttcaaggaaacttgagccatcacggccagacttttgcttcttaaaatcaccaagtgaggagaagaggacagagagaaagaccatgtggatatcttctgattacattaaaagctagccagttgtgttgagggtttctggaaggaacggatgcattgagcctgtcatttatcatacagggcgactcactttttctaacctttccccacaactgccctacgtgaccttattatctgtctttgaaaataaattggtagcattaagcttagcctgaatttgattcagtttactttttcagaaaaaaaaaaagtcaatttcaacaagatggaaggtaaaaactaaccaaccaagagggtttgaaagagaagaaattagtcttaagaaatgtttccctattttacttactattttcatattttatatttttttgtctactgcaaaatttataattagtttggggaattattataaacacaattgttcttcctggtattttagtttttaggttaattttctttttctttttctttttttttgagatggagtctcgctgtgtcgcccaagctagagtgcagtggtgcaatcttggcttactgcaacctccacctcacaggttcaagggattctcctgcctcagcctcccacgtagctgggactacaggcacgcatcaccatattttttgtatttttagtagagatggggtttcaccatgttagccaggctggtctcgagctcctgacttcaagtggtccacctgcctcagcctcccaaagtgctgggattacaggcatgagccactgtgcccagcgaggttaattttcaaaagaatgaggacagttttactacctgatgcctaaaattgtcaacatttgccttgtctcccaattcataattgctattccatcctctaagtctggtttatgtccagttaccttctccagtcactcgtcttgaactttgacagtccagtcatgaaaagctatcacttggcttcccgcccatggtatgcctttttccttccttctttctctgtctctctcttccttctctttctctctctctttccttctttctctctttctttccctcttttcttttcttttcttttcttcagaatctcactctgttgcccaggctggagtgcagtggtgttagctcactgcaacctctccctcctgggttcaagtgactctcccacctcagcctccggagtacctgggattacatgcacccaccaccatgcctggctagtttttgtatttttagtagaggtgaagttttaccatgttggccaggctggtctagaactcctcacctcaagtgatctgcctgcctcgacctcccaaagtgctgggcttataggcatgagctaccacgcccagctggaatgcctttttttgtctccttgccttggtcatgctgcttcctctgccaaggatataatttccacctttcctttcaggctctcgttttaataactgcttcaggtataattttccctgagaagcattcttcatcttcaatggttagtgagccaagtagcccatgtcagtgctactgtgctctatatgagaaacatatttaaaagtttaggatttgtgccagccctaacagactggaaatacctcgaaggcaaagattacgtctgaccaacagttagtactgttgtgcatagcaccgtatgctagactgatcttttatcactataattgaataattgcaatgttttctcatttttcaggaaaaataagtaaatggataatatattccaaatttaaagtttttatcctataattgtttttaaacctacctttgttaataaagtgtagctaggaattagcaagcaagcagatagcacacacgaatatcacagtacagcatagaggcagccagtcatacttagatcagttgcttactgcttttgtggatgtgcatgctcataattttgatttttgtaataacattgttgccacttatgcatgacaaaattagtaacacctatgacggacactaggtataacaataactgcaaagaacattgtgactcccaggtattctgatgcttaaataaggctgagaacctattcataatataaggggaattctcccttgttgttatttcagttattgatttagctgaaaatgtgagttgcatgctggtaattgagactagcattaattatttctagaatatgcagttagcagtgcaacataagcaccaagcaatcttcatgctaaaatgttttccccccttttgtgagtaaaggtatactttgtgctaaattccatagttaatgcttgatttccacccctcccatgaccatattagcagatccccatcaagaaaatcttttgttgtaataagaaatgacacaacccatttttagtaaggagaagctgtaaggaaagtgatgatagtaacattttcattcttccactttaatttgttacatattgctgtgctagatagattcgtctaagaatcctaatccatttacacacttcctgtgatgtttggcttattggcatgcagtgaacacttttcatcaacctttctgtgctatttcactaacacagcataaatataaggtgttgtgcttcaaataactctccattgtatacaactccatgtgagttgtattagctgaggcttattttcattgagacatcatcattttcagtgtaatctccattacttttaaattattaaaaattaaaatctctttatgtgaagtgcagttttcaagaaacagtgctcactagaattgtgtccttttttctatacaaagctgtagatcacgtatcatggggggctggttagactcaggtgcagggatgccaatttggagtcttaatacaagaatgagatggtggtctttagagtggtctggggtgagtactagtcccttactctccccagaccatgggctttattagtatgatctctttagtcgtatacatgtattattaatagtccatgaacaatatagagaacctaaatgatggcttagattctgatttcctattcccttttaattatctacattttctacagttgcagaatttacatataagacatttaatgtctaaatcacatgaaaactgtgagaaaggaaaacactgtagacatttttttttgtattctgtacagttctgtgtacatgtctgtgttcctgtttcacagtttttctagcaggtaaaacaaactgcactttaaggcaatatggtacatgtacatctagaatgtctataagtaggcataattgcatttcatgttgccatttcaatttgagctaatgtatctcagtaagtgctacaaacacaattagtaagtaataccaaagagtggtagcttccaggcctgataagaaaaaaaaaagtaatattaaattaggcagacacaaagaaaacatataaaaggggacataattaaaatgtaaaattactgggttattttctatagaaaaactttaagatctcaatcatgaaaaaatattagtggaaaacagtatgctattggtctttataaatggttgtttcattaaaatttcctttatgaaacctacttttcttcccaaatgtaggaaaattttattgttcagtgggtatatatatatatgtatatatgttttgtttttttatttgtttgtttgtttttgagactgagtctcgctctattgcccagggtggagtgcagtggcacaatctcggctcaccgcaacctctgctttctgggatcaagcgattctcctgcctcagcctcccgagtagctggaattacaggcgcataccaccacacctggctaattttttgcatttttagtagatacagggtttcactacgttggacaggctggtcttgaactcttgacctcaagtgatctgctcgcccggcctcccaaagtgctgggattacaggtgtgagccattgtgcatgacctgcagtataaataagttttaaggtgatatgagaaagtactttgcattgaaaagggaacagaggctgtttttctattataaataggccctggagggctcagagctggatgtcttcaccctgctccccagagagcagtccctgcttcctcggtgcagctggccaaggaggccactaaacaagggctgcatgccaagaaaatacagagatttgatcgtggccagacttacctaggagtgtcgccctctcacacgtgagaaagcacctgccatcatcatatggaaaatgcattccaaattctgaacaagttctgtggcatgaattcattcctcagaaaggcaagttccagtttttattcaaccaacagaatttcaattacaattgcaaaagaggaaaatactcaactttatctaactgctttggaccactctggttttggattaagtaaataaaaacgtctatttagtgaacgtagaggtgtcggtgttgggtgccgactgttgttttggcagattccaagctgtaatgttacatcggagaaaatgctttctgtcaagacactcttcactgaagaaagcaaagcctttctgggctgacctaaatcactgtgttccttcattaggccctttcagtactgctgtggagatttgttgcatgtgaagtgagctctcgggcataaaagaatgacatgccaaatgggagttgcctattttcttttgtatattaactagttgtataattcaccaggagggatagttcacgcaagcaggaacagcagggccatccagtcctcagctagcttccagcaggagtgggaattgcctttcaaattcagaataatttaatgatttacaccatttttattaaaaataaataaacagaacgatgtaataaaacaactaatgacttttttatacagcagtgtctgcgtaaaatactgctctggggatagcaaaggtacatcctttgtaatgtaagacatttgctatctctgtaacttttctatcccaggatggtatttgactattgtcactttcaaactaatttattttttaatgatttgagatgcatggatgtgtatataatgttttgggaaaaatctatgaattatgcatgatttacctgagagaatgttctaagataggcttgtttttaagatcagctaaatttagcatattgacattttttcaaatcctctttttgttgaggcttttcatttaaatattcagggaatatggcaacataaaatatacaaatttggtcatatatactggattgcctgtaagaaatgttcttatagtaaaatcttaatcagtatgtatagaatgggctgtctgtgccaaaccaaacaaaagggtccctaatggataccaggttggaaaggaacaactcagtgatggtagtaaatgttttaaaattgtgttttaaaattttgaggcaaactcggggtttaatggatatgtttgtagaaatacccacttaaaaaatagaagggctgtgacattaaagctgctgggttaaattttatttgttattggccacaacaatgatatctgcaaagcatcatgagtatttatttgaagtttaatgacttgtcactgaggtcagtggtgtttcctcattcttagattcttagttattttgataatggatttgtgctcatgagaagatctgagcattctcacttgaatagcaaatatctctatgaagtcttctctgcctctttttgtaaagaaactttatcttcctttattttgtttgttttttgtttgttttttgttttttgttttttgagacagggtcttgctgtgtcacccaggctggagtgaagtggtgcaatcacggctcactgcagcctcaacctcccgggcttatatagcttctgtcttatttctagtattagatagaggcttctgagatgctgctgggtaaaaatgcttaggcttgaaagtccttaaagagtctgagaggccttaaagagagcccctaaccctggggcctcatggcttacaaacactgggtctttagagagatggcaggtgactgacattgtttgctttatgtgggatgcctctcagaaaatgaaatggcagatgctgttgctttcttcaaccctgaggacttttagtgtgtcagaaaacaaattgactctaagttccatgtaattgttagtcatcacagcttatgataatgggacactacagcgttttcatttgcttttgcagatcatgttatgtcatttgctaaacaagataaataaggcttagaaagataatgtgacataagcaagtgatattgtttggctctgtgtgcccacccaaatctcatcttgatttgtactcctgtaattcccatgtgttgtgggagggacctggtgggagataatttgaatcatgggggcagtttcccccatactgttctcacagtagtgagtaagtctcaggaggtctaatgggtttatcagggatttccgcttttgcatcttcctcattttctcttgccgctgccatgtaagaagtgccttttgcctcctgccatgattctgaggctttcccagccatgtggaactgttaagtccaattaaaccactttcttttgtaaattgcccagtcttgggtatatctttatcagcagcatgaaaattgactaatatagcaagtctcatactttcttaatcatagagtttggactgcagtccttcatcctgcctgggactctgcccaagccttttctgttctacttcgttgagtattcagtaatttaactaacatttattcggtaatccatccagtattgactgagcccctacagcatgtcggatctgtgcagaatgccaaggataatcctgtgaataaagtagatagaggtgatcttcgtcttgttgaagctcacactccaacaggggagacagacatagatcaaatgatcactcaaataatataattaaaaatcagtcttttagaggaaaagtagagtataggctttcataaatcctatacataccttgtaaatgtgttcctatcagttaatttacctagttcacacttaacagtgatttaatttgtgtagtagatctttttgttacttaagttttataaaaacatttattcttcaaaatcattgaatagaatttgaggctgtcaatatggtgctggcaaaaggagcgaactgggtatttttaaccttaaggaatatgcgtatatatatataattttttttcttttctttttttgagagacaggaagaactcttgattgtcatcttttctgcttcccagggtccatctttggatttcattctaggacagtgagaagccattggatggttttaagcataggagtgaaatcatacgatttgcgtttcaaagaagttactctggcttctagggagaatgagtcttagggagccagcatagtggaaatgagaatagttactgctactgtcttgttctgggtgagaaatcatagcatgaagaactagaggggaaagaggaatggatggaaattcagtatattttggaggtggctctagcatatcttccagatcattgtatgttgagataatgcaaatattggagtgcttgccttctcattcttcactttcagaagaacccaggtcttttttaccctctcctgttctgccatcaggctacttgaaataactatgctcactcattatataaaatatttttgtccctaatttcctcaaaatatgggatggtgattctttgaccttttcttagcaaaccccattttccattctccagtgccaaccttgtctcttctcctcggccccttaagtccactgtgatgcgcttaagggcatgaaggcacctgtgatgtgctcttgcctccaagctggtgctggatggagctatttgctccttgaactttcctaaactcatctcgtcatctcttcccactgtattgatatctcctccttacctcttctcccgaagcaagaattcctcatctttcccaaagctgaccctttcacccgggatcatgattccatttttatcccacctcttcctaaactttaatcaccagttactgcccctgtgtttatgttttgtctcagaacatcttagaaggtaagtccatatttgctgttgccaattccatatcgcacatttaatctttcaaataatgaaatagactttctccaagatctcttataaaataagcatttcagggggctggagggaggactgtaataatcaaattctcttcctagtatcacatgtctcttctcagtctttagcttgctagacatttctctaccacatgatcctttccattgtaaaactctcttgacttcagtagaaattcttttgcttccttttttcttcctacctctaaaggcattccttttttttttttttttttttttgcttcctctttattttcccaagggttctgttgtcagtgatattttcatcttgccttaccaccatttgctgtctctattatcaaataccaactattgaatgaggacatacattttcttctcagattcagatttcattccatatagctgcacattttggaatcttctttggctgccccttttcttcactcccagcaccaaatggaggatcaagtcctagaaaactgagacctcagttaaagctcccttcctttgctgggtaactgaagcaatataggaacttgttgcccctgcctcccatctctcctgccttacaccttcccttacaatgtggttatcctacagaaacactgacttggctgtgccagtatgcttgtgaaatattcaaaactaactgaaaaatgcagagaataatctagcagacacctctatacttatcacgctgatgtgacaaatactcacagttttccagatctgcttcatatcattttgtcaagtaaatcacatattatgggtacatttgaaatcctctcccttctatttctattaccccttcatccctcctaaagttggcatatatcctttctgtccatatattacttatggtcttaagatttatgttaattgtattgtatagttgcttttgtggctcagattttggttttgaagcttatccatgtggacacaggtaaatccagtataactgctctcaacctgacatgggggaagggagcttgttaaaacacggattgctgcgtcccactgccagcatttcggattcagtagctcttgagtggggtctgcgaatttacattttaatacgtttccaggtgatgctgattctgctattcctgaacaacattttgagaaaaattgctctagtatgcttattttaataggggcatgccatgcctttttatgacactaccacaatgcatgtaatcattgtcctgttgataaacattttgtatgttgccaaattttttgcaattacaaataaggctgcattaaaaatccttgtacgtgtttacttgaacatatgaaaatagtgcccctagaacataggtacgaagttgctaggtccagtgaaatgtgaatactaaaccttagtagctctttacacatttctctctatctggtcatacaaataaactcctacgtggccactggcagtttatggaagtgctcattgctctgcattttcctctcccttagtatcttcggaatcttagatttttccacaataaaatggctataagatggggcagccttgccatgttcctcagcgttccctgattcatgctgaggtggagcatcttccttacggccagtggttcttcaggttacctcctctgtgccctgcctagttctgtctttcctcaatttttcccttgggcctttttttgaattttcatattgatttctacagttttcttactcattttggatactaatcttttatcagtggtgtcttcttccagtttgtggcttgtcttcacttgggttatagtttgtctaaacgtgcagatgctttaaatagagtggggacaaatgtatcagttctttttttcatgaacttttaaaataaagccttcctatactaatgttacaaagcattctcctatatttctctcttaaatgttaacactttgcttttcacatttaggtctcatttatataggactctatccttccctactaatacagaatgctgtatctgtcgtacaccaagatgtcatatctatgtagggcttctattccagtccattgatctattatctgttccctatgccagtatgtcactgttttagttactacttttattataacattttttgtgtgtttttatcctcccagagccctgggcttcattgccacttatttgggtgaagttttgtaaaccccttttccaagtgtgtcttccagggtcatggcttatgcacagattctcagatctagctttctgcctcttgcaggccctaaaacacgtgtctcgtattagcaagtatgctcagctccatccttcagccttgacagcagggtctgggaccaggaccctaggctgatgcggagtcagctggtgttctcaccactccgggttggccttccctctgcctttccaacccctggagtttcccgtcagcctgccttcctctctgcctttgtgatctctctctctctctctgtgtcctctctgtctctctttccagtagttctgcctggagcaggaagaagagcccttctcaattcagtcagctgtgttgccaagaagtccttctctgcttcttaaaaaattctgatgtgctctttttgtcatctaaaaataattcagatttcttttgcacggcattgaaacactttgtaatctgacttagaattagcatgatgttccagccttgtccttcttcacttgccccatcaccctcctgtttacccacattgggtaagtttaggttatgtcttctctcctttcaatatctgaaagctgttcggatcctccgagttcagctgtatcaacattcacattgtaggtattttcccacttaatttacgtttagataatggtaaatataattggattttctctgttgaccaaaggttaaaaggcttttatattcaaatggtttaaatactaaactatcttcctattgcttggttatacttttattagattatgttttaaattatgttatcatggcctgtaattttcctacattttggaattttcttcaaggtttctatgtagtcaagtcattcaaatatgaatgtttctttgaaaggaaggaacataggccaggcacggtggctcatgcctgtaatcccggcactctgggaggctgaggcaggaagatctcctgaggtcgggggttgatgaccagcctgcccaacatggcgaaaccccgtctctactcaaaataccaaaaattagccaggcatagtggtgggcgcctgtaatcccacctactcaggaggctgaggcgggagaattgcttgaacccgggaggcagaggttgcagtgagccgagatcatgccattgcactccagcctgggtgacagagcaagactctgtctaaaaaaacaccccccggccaacaaaaaaaaaaaaaaaaaaaaaaagaaatgaagactattttctgtagggtgccaaattcgccattgaggaataataatacatgatccatagttattaatacataaatttgatgcttcaaaaacagtccaccaaatacaatacaagatattctattttattttaatattaagaaagataatatacgaaactatttctatatttagatcctttaactttaaaatgtagtttgccaaataaatataaaattatgtaacacagaatattgttctggaaacactgggttggggatccagagacactggttctgctggatttattccaaactagttggataaaattgaaatatcatttagactcttgagtatcttatgtatttgtgaaatgaggatattggatttgatcatcacccaaatattttccaattctataaaatgctgggatcacgcttttcctgaggaaaagcgtgtgttattttaactttaaagtcagtttttcattttatgtgatcatctcatttataattttaaatgaaaatattaatgataagaaatgagccataatgaattgtaattattcaactgaaagaaatattattaggcatgataatttgctttagacatatcgcatgactatttccctgttgtaatgctgccctttagtgaagcctgcccacaccttgcttcatctcaggaggtactgttcagccaggcaaggtggctcacagctgtaatcccagcattttgggaggcgttggggaaatggcctgagcccaggagtttcagaccagcctgggcaagatagtgagacctcatctttacaaaaaatgtaaaaagtagctgtgtgtggtggtgcacacctctggtctcagctacttcagaggttgagacaggagggtcgcttgagcccaaaaggtcaaggttgcagtgagacatgatcgcaccactggactccagcttgggcaacagaagagaccttgtctcaaaaaagaggggcgtgggatgcctctcatcagtttcagtatctgaaatatcctaatgatgatgtttgcttaatttgaggaagtgtacatatattttaactgcaccttttaagatgttgcttaacaaacaaaatggtgcattttgcccacccaccctggtcttcctctttgccattctttctagatagatgacctattaaaataatttttaaaattacttaattcgtctttttcccacattacatcaatatatcatgtgtctccttctccagacaagtggagcctgaagaggtttgctgcacatttatctgtgtggcctaagggtgaatacttggtgcgagctgtcattttgtttcttatcttcaagggtgccactccggcaaggcaactagtgccccagcaattctattaatgtaagcgttggttctgccctctgacatcattttgagatggcctgcagtgtcctcaatcttgagcttccttgtaaacatattccagagtcacaggttagagttttaggagcatggccgggcgcggtggctcacacctgtaatcccagcactttgggaggccaaggagggcggatcacttgaggtcaggagtttgaaaccagcctggccaatgtggtgaaacctcgtctctactaataaaaaaaaaaaaaaaaaattaaccaggcgtggtggcacatgcctgtaatcccagatattcgggaggctgaggcactagaattgcttgaaccagggaggtggaggctgcagtgagccgagattacaccacagcactccagcctgggtgacagagttaaactgtgtctcaaaaaaaaaaaaaggaaaaaagggatttagaaacataatgaagtttaaagatatggatttcacgaggcctggcctgaagtgaaaagactgctatatttacatttttccccatcaaccctcactgatccaaactccactagtttagaatttatcttttggagcttgggggaggagggatattaaaacaccttttattactattattattagagatagagtcttgccgtgttgcccaggctggactacagaggtgtgatcatagtttgaactcctggattcaagcaatcgtctcgccacaacctccctgagttgttggtactacaggcattcaacaccatgcctggctagtttttcaaattttttgtaaggatggggtctggctatattgcccaagctgttctcaaactcccggcctcaagcagtccttctgcctcagcctcccaaagtgttgggattacaggcatgaaccactgcacccaacctaaaacatctttattatgtaagtaataaaattaatagtatttaagaaataatattaaatatacctagagaaacatagtttttgaggtacatttaaggcccttctttcaatacattcaagttatatacagatagcatatcaattacatattgtgtattcattaagaaaaagataaggattcaccagccaatctatttgttagcatgccttatttagttctttgtgtctgaaagcacttaagccattgtaagaaaagagactctactgacttaggtcattcttctattgttcaaattactaaggtttcacagcctatgaaaatctgttatctgttgagaatactcattccgtccgtcttcctgagaaatggagttaactccaccatatagacgtgcagtaagaatggctgtttgggccgggcgcagtggctcacgcctgtaatcccagcactttaggagtctgaggcgggtggatcacctgaggtcgggagttcaagaccagcctggccaacatgtaaaacaccgtctctactaaaaatacaaaaaattagctgggcgtggtggcgggcgcctgtgatcccagctactcaggaggctgaggcacaagaatcgcttgaacccaggaggtggaggttgcagtgagccgatatcatgcactgcactccagcctgggtaacagagtgaaactctgtcaccaaaaaaaaaaaaaaaaagaagaaaagagaaaggctgtttgtggctgtttggtgtgatgggaggagatgtgcacctgagctgagaagggcagggtagggatgacaggaacccacctttgctaatatgagtgccatgagccatgaaccattggatggctttccaattgtcatgaccaagtccttgttctagatggcatccttaactagaaaagaaaataaatggtcagtttattaattcagatattgtctatagatatattgtcaaggcaaccttttttttggtaaggttttctttttattaaaacctagaaaagatgatatatttgacactccatacattgtatcagagacctgtcataagtagtctgaaattaagatacagaatgtctccctaagcaaacaaataatgtttttaagtgccaactgtaactgttcctctcggctagagacacattagaactttgtcacttttagaaaatgtcaggtagccacagagctaaggaatgctttggacaaccaccttagctaatgccaggagttgcacaaaaagattaattttccaaaagtctttcaacctttgaagacagtgtccgggtctcctgaattccagttaattgtctgttctctttgtcatagttgccccagtctccacatttattcagtcgtcagtaaatatgtattggttgcctacaatttgctgggtaccatgctaggcactgggcatgcagataagagtatcatacggcctgcaagagtctagtggacaagagagataaagaaacagatttgaagaggtgtgacaaatgctatgacaaaggaaagcccaggatgctgtgggtacctagaggaggaacagctgctctagatttgaataatatgaaagatttaccagggcacagagttgcctcaggtaagtctttaaggtcatataggagttaggagagagaagaaaactattccttgcagagacaagatttacagaggcatggagggtgtgaaacaagacagtaacaataaagggtggaagtaggggcgtgatgagagataagacagggaaacagggagaggccagatcaggaaagaacttacgtatcccgcagaagacctggacttactcccagagacaacagggagccactgaagtctttttaagttgaacatgttagaatctaatttctctttggcagcaacacaaacatgttgctgaaatgattaaaatatttgtttaataaatggatgagcaaacgaatgaatgaacatgcttgttttttcagtcatacctagacaatgatcattttcagtagcatcttgcctatacatgaaggataaataataaaacagcagttaacggctactgtccaattctcataaacctcattttaccttacagaataatacaatttctttctcatatacacattattacatgttatttactgtaatactttcatggatacacattaggttttttgacacttatttccaggattcagtcacttaaaggcggcagtttatggactgttctaaaaagaagcctgaccaacatggagaaaccccatctctactaaaaatacaaaattagccaggcgtggtggtgcacacctgtaatcccagctactcaggaggctgaggcaggacaatcgcttgaacccaggaggcagaggttgcagtcaaccgagatcgcaccattgcactccagcctgggcaacaagagcgaaactccatctcaaaaaaaaaaaaaaaaaaaaaaagaaaaaggaaagaaactccatctcaaaaaaaaaaaaaaaaaaaaaaggaaagaaagaaaaaaaatgattctgctggaagagatagttacgtagactagatagacatcaaatgttgagtgttgcctgtgtcaggaaggacaggacaaagctccgttcttcagggagcttacaatttatagagttgggtataaggataagatgtacaggagacttgtacacaatagactgaacaccaggtagagtcaagtaagtagcaataagcacaaatcccttgttctgagggttcaaaggtggaactgaacacaactggtttagagatctcatcaatgtaaaggatgtatacattctttttatgttgttttctatttaaatggtgtttttttccttttttaaatagacatataacaattgtacttatttatgggtacatgtgatattttgttacatgcatacaacatgtaatgaccaaatcagggcatttagaatatccaccacttcaaacatttataatttctttgtgttgggaacatttcaaatcttctagctattttgaaatatacaataaatgattgttaactataggaattctgctgtgctattgaaaactagaacatattccttctatctatactcacttccattaaccaacctcttttcctcctccccccttatgcttttcgtagaagatggaatactgtgtacatttggttgtgtttttcaaactgtgtcattcgcatggcatgtaagaagtggaggcgcctagactcagcaaagacacggctcaacattgcagagctttattcaggcacaacagataattcatggcctccctctgctgcacaaaatgagctgctctgcaaaatgattctaagtgttttgaattaatgaaaatgcagcacaaagggcgtttgagtccaacagtgcagagccatagttcttttgtaaaaattgtagagccaatttgctcatatgcaaaggcatgggaatttatctctgggctcacattttgacaatcacaatttggagaattatgtttttctagacttctaacacctgatactttatgtaatctttagttcttttacctatttccggaagcgtagttaggtgttttgttaagtttagttacttaaaataatttctttctctttgactacttgccaagtttaaattcactgaatattcactgagcatctactatgcacaaagcagtgacagtatagtgaaatttattatagtcaaattacatggggcacaaagggaggttaatggttatgccacaccctataaaggagatttccattggctgaagagttgatatatgaactgagttaaaaggaaaagtgaggctgattcagaatttatacaattagccattacaacatcactaagataaatctaaaaatatactgttacatatacaataaaaatatgtatttataagttatttcccattggattccacctaaaggaggtttcgaaacatggcagcctctttcttcattataaggtgattttgctgtaaaccaggacagtggcagatagacattcaaatacaagtgtagccttgaaggaataaacaacatggaaaatgggcttatagttacaagtatttcatatacataattatggctacaatttatcaattgcgtctaaagtgtctcttttctgctaggcacttattatgtctaatttaatcttctctacagctttgtcacatagatatcattgcttccatttttagaaggagaaaaaccaaggcttaaatggaaaataacacactcaggatcattgcgaggagccagaatttgcacgcatgtgtataagcctttcctattctgtatgtgtttaaggagagagagagagatttgtttcatctgagacatttattatctactgaggagtcaacttttctaaatgaatctaagtttatatatttgatatttgggaaaaggactttttttccatgtaagaagtaaaccaagtttcatttcagccctaacagtgataaagagttagctgtatatccagctgcttgagtgggcctattactgtcacaaaatacctgctcctattatgtaaaatccattacaaagaatgtagaagttactcatgcaagtataaatttacttttctaccagcagaattctctacaatcaatcattttaatctatactgtttttttctttcttttttttcccccgagactgagtctcgctctattgcccaggttggaatgcaattatgtgatcttggctcactgcaacatccacctttggggttcaagctgttttcctgcctcagcctcctgagtagctgggattacaggtgctcgccaccatgcctgactatttttgtatttttaatagagacagggtttcaccatgttggccaggctggtctcaaactcctgacctcaagtgatccacccaccttggccttccaaagtgctgtgagccaccgcacctggccacattaaaggtttatatagtgaaagatagtatagtgaagtgtatgtgggaggggactagatcatatgtgaatgaatgtatggaaagggggcaggagttggtgaccccggaccggctgtgtcacaggctgtccaggtgtgggatggtgagaacctggtgaggaggctggaggcacagtggagatgtgtctggaagcacctgtggacgtcggtgatggtgctgagtgccatcagggaaagatgaacaacacttggcggcagtgttttaaaattgagtgacagtgagaaagaaagatgacactggcagagaatctgcaagggctcatggctctgaggaccaagatgacgtttgctctttaggtatcacactgagatctggctttgaagtgtgtgtgtgccaggtggctcacacggcacactggaggtgagacagtcagtgggctgtgggtgtcagcttggacatcagaatagagtgggaaacaatggttccccaagctcttggcattcaggtctcacctccctcccccagccactggcccactgtgtcatttggacacaacttaataccatttcaaaatatttgagactgaaataaaaagaccaaaaagtgctgtacagatcagaaagcctgaggtttcttgatggacttaaatttaattctctgatgagaaaaactctaattttgtatacttagatctttttggaacacgatatgtattaagtagtttaaaaaagtaagaagtatggttttgatatttaagtccatctcaaatacttctttgaataacttttttcattagtaagagctgaaagaggaaaatttatgtattaggctttcagttcaccaagtactctacccaaatagctctattgtatgatgtctctcgattaactgtcttttaatgtggatatcaaactccaccattaaaatgatgttttccttcagtgacagtgaaatatcttactgaaatcaatggtttccagtttggtatcgttctttttggcttcgccatcatttccttggagggagaggttaagtacttgttagctactatgttctggtctctaataaaaataggattagattctcttaggtttagagtggagccagggttctgttagcttagtccctggtacgacataggcaaaatgcctacttcgcttgattctacagctatgaaaaaatgagagagattttctcagcagggtaactgggatttttagttaataataacacagtatttactgtgcattccatgccaactttacattcactatctcccttaaaccacccagtgatcctatgagatcttcacaattacaatccccatttaagaggtttattcaaggttccaacccacatatgtctgatcatatatacaagcagctttgttatagggatttgaccttctgcaattgtgagggctgatcaagcagtgtttataaggctgttgtctcacattggatgctggagcttgaagtccacatggcaggctctggagaagagaaggttgatatgaagtgggggagagcaagaaaatctcaaccctgatgctggaacttgtgtcactgttgttgcctctgggcttactggggtcttgcagaagccagggttccccaccagggtgctaaacaagcacacctggccctgggtcagagatgttgaggaaaggccaggggacacagcacagctgcaggcccagctgttgcctgatgccaacgcccaggctgtagatgacaacagcctgtgtaagctgcagaatgaagggtggctgcttcagcccatcttccagatcccacctaagaacctctcttatttatagtgcaccacaatgggagacatggagagaatgggattctgggaaatgtagtccagacagccacagtggcacattgcagcatctccacaatgaggcaggaaagacgaaatagatggacagtaacagtaaggaggggattgggtaaaggccatgtaatcatccatcatgcgattcagtcaccacattgcagagtgggaagaggatatagaggtcattgagttttctccctcatctcacaaatggggaagtccagtcaaagcctaggaggctggttttcctgaagacactggatgaggccagctggtgagaggtggaaagccccttcttctccatctttatttagcttcgttgagatggtgtggggttatcagtggataatctaggctctgtgtgtaccagggcttccttatggaaggagtggtcatgcatggacgctttcgtcaaaggatgaaataacacaattcttattttcttatcaccagcttaaatatgcaaattcaaaaaactttcagtattccccatttatcttcttcactgctcatatttcttgagtctgtcttcttagttataagctgattattcttctctttgaaatatgtagtttcttagacccaagagataaatctttttatatctaaaatatgaaccttttctctgagtaccttatagtcacctgataactctatttgtggaattaagtactgctgatggcattgctgagtgtccttggctcattgctgcctgattttcattcttgtaaccaaccgcatctgaaaagttctttcaagtccataatatccctctttgcctctacaaacccagcaaagtttccttttactgtctccaacctttggccttcaggaaggataaagggagaagtcacctttggtccttcctcttcgcagttctcccttttccattttaaattgcctctctcttcctctacataaagggatggtggttctgagaagcagctgcagcaggttggcgatagaaatgtccattgatttttatcctgctggccgaacaagggaagtaagagataggctggtataaaacaaaaaactctggaagaagagattacatgtcttctgcatgagcaccatcctcctcccttgggtgtgggagggggcaggaagcacaagtgtgcatgagacatgttcttctgcttctttttttttttttttttttttgtttgagacaaagtctcgctctgttgcccaggctggagtgcagtggcgggatctcagctcactacaacctccgcctcccgggttcaagcaattctcctgccttagcctcctgggtagctgggactacaggcatgtgtcaccacacctggctaatttttttgtattttttagtagagacagagtttcactgtgttagtcagtatggtctggatctcctgacctcctgatccacccaccttggcctcccaaagtgctgggattacaggcgtgagccaccgcgcccggccccacacctggctaatttttgtattttttagtagagagggggtttcaccatgttggccatgccaggctggtctggacctcctgacctcaggcaatccacctgcctcggcctcccaaagtgctggaattacaagtgtgagccactgcacccggccattcttctgcttctcgactttcaggtgtgtgaggccagacaggacatttctttctttcctcgataaagagcctcagcccagggatgggacctgtgagacaagagaggtggctctcagcacaatctgagctgtgctcccctaggcactgctgtggagctcagcctgcattgaatggttggaagcttcatgcaacccaaactcttctgctacttggatgagccaaggggtgaggataagcaagcgcacccttcaatgcaaattatttccccttcgtctttcaggtgacatttgtcactgtggccttacaggccaatcttttatcatgttagtcatttaggcatctggcttttagttcatgtgagcatggtaagagactagtggaagcttccagaagtacagaagaggagaccaaaagaacttcagacttggggcatgagggcatgaggccgagttcagaagcaggaccatcttgtttccatttcctctgcacccgagacacgtctgccacagtcacacctagaaatccagatggcccagagacagcagaggcaccgaggtactcagtccaggtatcacagcaaactgtccgccatctgttattaatagtagcttctcagcagcagtttatttctcagggaacacgtgatctgctgacaggatacttttgctcaggagtgttctagccactggcatgttatcaagacatggagccatgcccggaagtccctgattgtgcggctggtcacctcaacaagctacccggtgtggaccctgctgcagaccttccaaggagctgtgacgaatgggcctcaaaggcatctgcccaaaagactggttctccctagtcaagcctgaccccctgagccagctgccttgctcccccaggcttgtgtatgagccggatggctaagtcagtctccatgggcgtcccacgagctggcagtgtatgaggcatatgaaggcggaaagtgagtgaggcacggcaactgcagtcaggtgctgtctgggcgcagctgcaggcagtggctggagcatgaaggtggactaaaggttgtagggtgacgtcgtcacgcacacctggtgcgtcacctctgtctgggccctggagacccagtgaagcatggtgatctcaggttttccttcattgtgttttcaaaatggttcttatgctgagcaatttgttgtttacaccctacaaagtggtccctggtgccatccttggttggttggtttttttttttttttttgagccagagtctcattctgttgcccaggctggagtgcagtggtgcaatctcagctcactgcagcctccatctcctgggttcaaatgaatcgtgtgcctcagcctccctagcagctgggactacaggcatgtgtcaccagacctggctaatttttttttttttttctgagacagagtttcactcttgtcacccaggctggagtgcagtgctgcgatctgagatcaccacaacccccgcctcctgggttcaagcgattctcctgcttcagcctccacgcccagctaatttttgtatttttagtagacaccaggttttgccatgttggccagggtggcctcgagcttctggcctcaagtgatccaccctccttggcttcccaaagtgctgggattacaggcatgagccactgcacctggcccctcgtgccgtccttttgaagggctcagtgtgagggcagtgctgaggtctggatgctgctctcaacgcttttcctgaacgatccatctttccatttaaactttgtaggcattgagagtgtggatatgtgaaagttgtccattcacgaaatgtgattatggttgcatttttcttaatgaatatagaccagcttcctttttggcttagtctattattaaaatcatttattagaaatatcaaataagcatgaaattcgttttgttttcttaaagaaaaaaggtagaatactttgtttagagtcttaaagggattacaggaaactatgggaaaaaattcctggattctggaattaagtgttgtcatctccattttctgatctattagtgagtgttattttttgttgcactgactaggaaaatatagatgactgtattcatgatcttctgtatatcaaaacaaatttaaaggtataacagttagtgaaatgtttatttcttctgtgaagttaaatgttggttgcttttctttcttttcctggtggtttagaagtaaataaatgtttgcttaaatatttcataaaagggtagactttgaaaagaaaaagcacactttttccccccgacaaatgattgaatttctttttcctcatgaggcaataacccagaaagtaataagggtgtagaggctcctgcaggcagtgttttaagtccttttctcttccctctttatgaaaacctgtcacatcgcttccaaggactctgcagggagccatgagagagtatgctgtcactgtcactatggtaaggacatcccatctctacaatgggacaatatttagttgctttgaggatgcaaagtgatttgcatctgacctcatgccagcattttcttgctttaaaaagaaacaaggatttaaggtataaagacacttcttagaaatttaccccaaggaaattggggataatgaggaggggttgtgaccctggaacatagagaaaagttactggaagcaaagagactgtgatctgtagcaaagtggagatggccagagtggggtgtttgtgagtgcacggacagcacatccttcagggactgtgaaatctgagacaccacaagggtacaaagtagaaggcaaattggaaataatttttctccaagttgatagtgaccagggggtgggaaagttattcctgcattgctgcccccaacatacttataactcctttgaaatttgaggcttgaagtgtttatttcacaagtagctcatgctgtcgggcaaagtgcggttttgcgtaaaaatagggactcaaaacaaagattgattcatcagccatgatgaactttgttttgttaaatttaaacaaactggtccaaactcatacttttttgtgggatagattttctatctttcctcagtgcaggcagttgaaaaatacagagttttaatattctgtactgaatccctttctaatgttttactttgtgcacttagaagataagtattcttctgtgaaacaagctaaatgtatgctgcttcagcttttcatatgtcgctttggaggagggccagcagaagaattctagaatataatgccatccttgattgtttcatagagattaactgaatttttgtgcattggagtaaatttgaactttgtttaaggtttataccagtacatagattattaggttgttctttaagacactgccttatttagagtaggtgacatttacaatttaggaaaaaggaagaggaaggaaggaaggaaggaagggtgagctccttctccctggacccctgctcctttctccctgtgccaaattgttaactcctactcatctttaaagtttcaggagtggtggcttatcctggatctccacagacagacccagaccccaggcttcaggaacacctttacccccttcttagtatcacctatcagagttctaatttcagtttgcatgattattaaatatttgtctttcctgctagagtgtaaactccatgagggcaggaccctttcattgcttgactatggattcctaatgcccaagagcctggcaggggctagtgtcaatcaccagcactatttgtcccttgctatgcgtcggggccttttccaacaccatgtgggcctgctcgtgctgttctcacacaagcagccctatgcagtgagcagtattgttctcatttacagaggaggaagtgatactcagagaggacggtcacccatccagagtgacagaggtagtcagtggctgtctgaccccaccacctgtgttcttcattatcatgctggatagcctctgaggaagtgtgagtagagaggaggaaaggaggaatgctattcagcctgagctctgctgatctcatgaggtatggcgctgcagctggaggcgacccacaccttagtggatgtggggaaatctcctcagtgaagagtggatttgtggagaccatgcatccacactggtggcacttgcttttcaataattttattgtcgtgggacatacatgagtaaaaatggaaattccaaataggatcaggcataggggcgtttccttaatttgacctaaaacatgcatgcctggagattctcattggtttgataagacaaagaaagaaagtcaaagaattattgggaatattcagctaagagtaacaggaattcttccttctatagacagccctgtgatttttgtggtgtttaaactttgtaaaatctggattttatcaggacaagtgaaaaattgcagaggactaattcctaaatattagtgagtgtttaaccctccgccaaaaaaaaaaaaaaaaaaaaaaaaagggaaatggtggatgtagtgtctgttcttatgtctgggaggctgtctaggcaaaactcttctttttggtgttaaaatacccattattttaatttaattttattattttttgaaagtagagatgggggtcgcactttgttgcacaggctggtctggaactcttggcctcaagtgatcctcccaccttggcctcccaaagtgttgggattagaggcatgagtcctcatacccagccaggcgttattttataaaacagttttgctaggttatttgtttgagtgaggttttcaaaaatgtttttaaagaacaaataatagttgtttctatgttgaattcttcacttaaaaaaaaaattctggtccatgaaattcaaaggcctgggaaccactgattgtaagaacttaaatctattatgttagtgaagctttttgccaggaagtccttgtgtagattttatgtaattctttgctcgtttttccagttttatgtgtgttcatttcctcagtaaagaaaaggaattactgagaaaatcataaaaagtgatgacagggagcgtaaaaagccccaccacaaatgtgtcctgccacgcgtgcaggctctcctggggacagaggcttgtgcctgggagatacacacagcctcagaaaaccagtcacttggccttccttctcaaggaacaaactagaattggtgtttctatctctatacaaagtcttgccagcctccgttagagaatgaaaacgcagaggctgtctggcaaagtcaactaacaaccactccataaggaagcactttctgcaaagctgaccccaggaataaccctttagacactgggtggtcaaggaggtagagttcatatcttattagattttaaagagttaatcacactttctagaccttcttagtaggtgattatgcgtttttttccttaaaatctacttttcttttctttttttttgagactagagtctcactctattgcccaggctggagtgcaatggtgcgatcttggctcactgcaacctctgcctcctaggttcaaatgattctcctgcctcagcctcccgagtagctgtgattacaggtatgcactaccacgcccggctaatttttgtgtttttagtagagatgggatttcaccatgttggtcaggctggtcttgaactcctgacctcaggtgatccacccacctcggcctcccaatatgctggtattacaggcatgagccaccacgcctggccaaaatctacttttatatgagagtactgatgtgtttatcttgtgacatgctccatatggtgtcttacatgtaatgaggcttttaaaataacttttgaatatgcagccttataaaatagtctttcttgttggtagaatgtcaagtaaaacaaccaccatttgaaaaggcatttgataatacctatcagaaatgcaagtggacatgttctctgacccagaaacttcacttctcatattcggtctctcacaaatagatgagcaagtgtatggtggtacatattcacagatgcattattgttaattatgaaaaacagagacaactggaatggccccccaagggagaatgtttacataaattctgatatgcacgtggtgtggtacaccatgacaccaaaagaaaaaaatgtggtagaactgtagttcctttaacggaaggagttttgtgcattattgagtacaaatggaattgtagaactttttgtatgataccatttttgcttaaacagcaggctagattgatatgtgcatcatatatatcaatcatacatattcatacatacgtacatatacatatgtatgagtagtaatgcagctttaagagcctgcaaagttgtacaccaaaatattaacagcactttcccctggagagtggaattaggagggggttgggtggagaggggagtcactttcatttttaaagtgtatgcacgtttcaaaaataaaagagcaattcattttataatttaagaaaaacaaaagactgaaataaacccctcttaatgtcagatattaatttgttagcgatttgtgtgaatgcaacttaatagccactgacaatcatttgacgtaaaacaggctttgcatatgcgatagaagattatggttctttaggattttctaacaagcctttagctccttcaggttctccagccagactgaagatgcagtgggtgagattccatttctgtcagtgtgactgtggttccctcaaatctcaatcacctgtgtctgtgcactccagtaggcgactaactgagattgaacaggttgctccaaagggtagttaactcagattaatgtgaacagttgttggggtaaagacaagtgtagtgggtgtcagtacaaagcagctgtctccttggtgagttaaaccacgtgtggcatcccagtaccctgctactgcatcaaattgagttactagttgtggagaggaagataaataccagtgtgcaggtgggagtcaagtgctaatttactattttgagaaaaaccaatcacatttattttggctttctgctgtaacatttaagtctacttctgacctcaaaggaaataattacctattttataagtcattagttgtgctgagtagcatttaaaaaatagcagtgtctctcatactactttggtgttttctaaaataattgcacaaagtcactgtgcccacatgttttaaaaataagctatgcaaacacaattgttatctctagctgagttttaatgctgtaagtaaaaaataatacgtaccattcctctaaagaatccttagttgatcatgagctttgaattgaagaatatccctaaatatccaatttttctaaggaataaagaaaaatcctattactttattaaagatattccagtgggttaactacaaaagtgacgaatgaatgccctcaacacttgtgtaagtactacaaaacttctgaaattatataaaatgtattttttatgttatagaatttacattcacattaataattactgatgagatttgtctttgtttttcctgattatgaaaagaatatatgccacaggccatagaaaaactagtaaatatgaccacataaaaatttagagttcctctagggaaaatgatataaacaatgtaaaagtaaaattgatgaactgaagaaaaccatttaatgtaagtgataaaagggccaattttcttgaatatgctaacagcacttacaaataataaggaacaaaatgcccaataggcaaatgagcaaacatgatgaacagatagtcacagtgttatacatcacaatgaccaggactcctaagaagcatgccccgtctcactgcagctgaagaaccgcaaattaaaagcactgttgatctcagtaggcacgtttatggactccgatgtactgttactctcttgattcggaaggctaacaaacatctctacgttaatgtgtcccaaacagaattcttgtttttgtcttcttacacctgctaagctgtttgtaactcagtcatacccatctcaacagatgccaacattgtttatctggatactcaagccaaaagtcagtccagcctgagtccccttcccccgatccattatatctagttacagtatcaactcctgttggctgcatctttagcatgtatgcagggtctgtcagccccacggagaccccctgttttgctaccaccattcctgaagaggtcttcctgccttgacacttattccctaatgaaccgtattcttcacctaacatttagaatgatctttttcatcttcattaaaatagagtctgcttacctttcaaaacaggtaatatatttacatgattcaaatttcaaaattttccactaggatttacagtgggacatttcccaccaacttctcttgcccaaacagccagttcctttatattaagaggcatctgatgctatcgttgctttcttcttttttagacatactttatgcatagacaaccatatatatctttttaatacagatgatcaaatgatagcatatttttgcaatgtttcattcagtggaaatatctctacatcagtacatatgagcatcagtatttttcaagaatgtatggtattcccttaaatgaatggaacacaaggtatttaacttaacttgtcccctattattgacactgagctgaattttttcagctttagctgttataagcaatcttgcaattagtagttttatagacacatcatcttacatatgtctacatatttctgtcatgtaaatacctaaaagtagaattgctggatcagagggcttgtgcctttctaattttgatagagctgtccaacttgtccttcttggtagccttaccattgtagactgcctccagcaatctgtgagatggcttgtttttcttcaccttttggaacatcatgtgttatcacatatttaaaatcttctttcctttccccgtctccctctctccctctctccctccttccctacgtcccttctttccttccttccccgcccccactgccgccactgcctccttcacagagttgaatctgtatcccagtctgatgcttctcagcttcctacacctccctccaaatttttaaatatatattttctaattttaaaaatttgcatatagttaaattaacttttttggtgcacagttctatgtgtttttacataggcataacttcttttacctccaccacacataagacacaaaacaatcgcaactccccaaagaatccatccccgcttccttcacaggtgtctcacccaataaatttcttgcacatgtcatcagatcttgatgtctgtttctcagagaggacccagactcgaatatcgtgagactgggttttgtgcatatggcagataaattatccttgggataggggttcacattatgtttgtcttctggtgatgtgactttttacactttgagtagcatatatttatggaggctgtagtaattataatgaggtataatcatatagtcattataatcatagtataatcatagagtcatttctgggtcttaatgtcttcaagtcttacacatccgtcaaaagttgggctgtaacaaatagagctagctgtccaacaatggaatcagtgcataccctcaggccggagtgtttctgctggactgcgtcagtttggtattaggtatgatggataataaatttccacgttggaaggtagattggacaagatgatctctaaggatccttccattagtaagccacacagattttgtgatttaaagagcctatgcatctcattttagagttgggttttggagtagatatttattcttgcttgctttcttttctctgctttcatttatccattttacatagtatacttggttcatgtatttttctttcgttgtttttaatatgaaggctttaaaaaattatggataaccaatcaacattagatgtcacaaatagttacttttgattccaatattgtgaatatttctgttgccattattgctggttttgtttgtttacgtagcttaacccctgatgcactctcagtcacacagttttatgaagatgtagactcatgtgttttgacatatacataactcgtcagaataggtttcctgggtaaccttggaggttcttgtatgccttcaactggaatttcttcaagtgcacttgcttgtgtaaaagatgtatttatgtgatgatgtattggttggaatactgcacaaagttagttttttgagtagcagctgaacataaaataaaaagttgtgaaagtatgaaaagccacagtgttttaaatatttttgtagtaaagtcagtgccctgtatcaagcatggagatcattgaaaaggatctttaaggagcctggctttttggacataacctaattatcccaggagataaggttatcacaccacttttcattatctgagtaaacatagttattctgggcagtgagtgttgccatgggtttctataactagaagtttaagcatgctggaaggtaagacccaaagaagaaaaggggcaaaagcaaataggagtccaccatgagacaccaagccccccagattactcctttggtatttttttcagtttgaaataaatgttataataatttcagtctgaggattttatgtgtgctaataaatctgaatatttccagaaataataggaaaagcttatgttggcccatataaaggacacaaacacacgcatgtatttcttgttttgacagaacatggtaactggattcatgtttaatttatagttctttgacttttaaggtagtgctctgtcatcagccgtcatttgaaaaaaaaatattttagttaatcaatggtatgatctaaaatggcttaggactaatagattagtggagctgcactcttcattttatgaaaaaatgtttctggcactaatggcacgcagcagcaaataatgttcccttttgcatcccagtgagatgccaaatatcatgctggttaattttaatacaaaatgctcaactcttaagagatagcatctgcctgcccttgaatttccacttaatggaaacattatacgttaacaaaaaaactgcttttttttcccccaccagtagtggtagaatcttagaaagtgagttaactttaagagaaaccttaaaatgtatcagcaaccagtttcagaataattagctaatagtatttacagattttgaagagacttaagtttacctctccatggacatgaggattctgcagataagaatttgtggtctcgttataatttggtatcctgtttgctattataaatctgaagctggctagatcaatagggaatgggttatttttgaaagcttcacttttccatatagctgactacttaattctttatatgagaacattaattctagtagaatgaaaatcagtttaggccaggcgcagtggctcatgcctgtaatcccagcactttgagaggctgaggtaggcagatcacttgaggtcaggagtttgggacaagctggccaacatggcaaaactctgtctttactaaaaatacacacacacacacacacacaaaaattagctgggcttggtggtgcacacctgtagtgccaggtactcaggaggctgaggcgggagaatcacttgaacccaggaggcggagggtgcagtgaggtgagatcgtgccactgcgctccaggctgggtgacagagcaagactctgtcttaaaaaaaaagagaatcagttaaaatacactgtctccttccatactatctaacaaaagggtaatgattgggtttgacttcttctttatgacttggtggcctcatcatttatgggttttggtttttatgatttgctagagtcagggaagcccttgaagatggggtgggcagtgtcctaggctgtttttcccctcgctaacacagcagcagtccccgtccgctggtctctggtgggcttcaccagcagcactcggtcctcctggtcattgtttgggtgactgcttttcagtcatgtcaactggcaaatccatggcacaaagaaggagtctttttcccatgtaagtttttctccttcagaaatagtttctacttacttccatgtcatcttcttcctctcctccctatttttggtcgtcagtaattgtccgtatcattcaaatacagtaaaaaaatgtatacagccatgtgccccatgacatttcagttagtgacagaccacatctgcaagggtggtcccataagattgtcatggagctgaaaagctcctatagcctagtgatgtcttcgccatggtaacatcctagtacaatgcgttcctcgtgtgcgtggtgaccctggggtcaatgagcctactacgataccaattgtgtaaaagtccagcacatacaattatgtatagtacgtgattagaaaaatgaccatattactggtttgtgtatttatagttattttatagaacttatactattttttttttttttgagacaaaatcttgctctctcacccaggctggagtgcagtggcacaatcttggcccactgcaacctccacctcccgggtttaagcgattgtcctgcctcagcctcccaagtagctgagattacaggcatgcgccaccacgcccagcgaatttttgtattttcagtagagacgaggtttcactatgttggccaggatggtctcaatctcttgacctcgtgatctgcctgcctcgacctcccaaagtgctggattacaggcgtgagccactgcgcctggctcctactaattatttttgagaaaaaaaaacagataactgtaaaacagcctcaggcaggtccttcagcaggtgtccaaaagaaggcattgtgatcacaggagatgacagctctatgtttgttattgtccctgaagaccctccagtgggaccagatgtgagtggaggtgggagacagtgatattgatgatcttgaccctctctaagcccaggctactgtgtgtttatgtcttgctttttaacaaaaatgttttaaagataggccaggcatggtggctcaagcctgttatcccagcagtttgggaggcttaggtgggcaaatcacctgagatacggagttcaagaccagcctggccaacatggtgaaaccccatctctactaaaaatacaaaaaaaattagctggggatgttggcatgcgcctgtaatcccagctactcaggagactgaggcaggagaatctcctgaacctgggatacagaggtttcagtgagccaagatcacaccaccgcactccaacccgggcaacagagcatgacaccgtctcaaaaaaaaagaaaaaagttttaaaggttgtttttttttttaaggtggaaaacagcatatagagtaaggatatgaagaaggaatacttttgtgtagctgtgcaatacatttgtgtgttaaaccggtattattaaaagagtcaaaaagttaaaaagtttataaagtaaaaaaagttacagtaagctaaagttaatttatcacagaggaaaggaaatgtttttttctaactttagcgtagcctgagtgtgcagtgttggtgaagtctgtggtaatggacagtcatgtcctaggtcttcccattcactcgccactcgctccctgatcacccagagcaacttccagttctgcaaactccatgtttcctagacgagtgtcccattttttaccttttatactgtgtttttactttacttttttgtgtttatatatacaaatgtttcttgttgtgttacagttgcctaaggcattcagtaaacatgttgtgccggtttgtagccaagagcagcaggctgccccatagagcctaggtgtggagtcgcctgtaccatctgggtttatgtaagtcccttccgtggtgttcccaaaacaaaatcccctaacaacgcaattcttaaaatgtgtcctcgttgttcagtgacccatgactgtacttatctcttggtttcacggttggttactcaggaggtcacagacacctgcttattagaatgctcttgctcttctctctgtctctccaagcctagattgttcactggctgtgcaggagagagaggctcctcaccattgcaagctctgtgttagatgttttgtgaagggtttagttcaaggtcttcctgtgcgtttaatgaacagacatgtgacttctgtggacttgttgttctccctagtgtttaagcggagtttcagccacaacaacattagaaatcacgtctttgatgtttacagccagagtcactttcaacagtgataactgtacttactctttgaagaactctgagccgcagcctgaatcagggaggttatatactaggccagaaagagaatatccaattacaggtcagtatgaaacctcttttctcagagtaagctctacagttgttcataaaattaaacaaatacatgtgaatgtctcctatatgggagactgtggtaggtactaggggaagaagatctcaccgtggataaccatgttcgccctgtgctctaggactctgcgctctaggaccctgtgctctaggaccctgcgctttaggaccctgcactctgggactctgcactgtactgagaaaaacagttgcagaagccgggaaacaggatgaggctgacaaacagtaaaggatcctagtgttgccaaacaacagcaagagatagagcaggatttgtaagacgggtataatttgaatggaccttccacaaggttagcttcctgaatagttagagatgctgtaggggaaaggttatcccagagaacatgcagttatgcaggagaatatgaagcatgacctagaaacaagctccctgtggctggtgtttgtgaagtaggagaggccgcagcagagaggaggaggatgagaaaagagtggatactgaaaggggaaagtatagcaagaaataggtggaaaaagggaatcgtaaaggactgtgaacacctgaagactttgcatcttgttctcaatgaagggagtcaccaaagatggttttgaatgaaaggactggcaaaatgaccctgtgtagcaactgcataactcgactcttataaagccagtagttctggacatattctgttgatataagaggagtatagatgctgtcaaaaatgccaatggaaactcgtgcatcagtgtgtaagtcccacgcgtggaagttctaggaggtaacattcatcagcgaatttattttttgactgcctgtagtatcactgtgagcaagaacagctggcctatacctgctttatttgaaacctgagagatgataatttcctggtacctaccaggatagaagttggtgggcaatgatgaaacacctttgagcattgtaaaaattttaagatagattgtgtgatttcaggaaaatagacaccaaaattttctctggtgtatattctggctttatttcaatttcatttttcttaactccctcaaagagtcaagtgtatttgctcaaaaactgacctcttcattgagcacaatactggaagtagagtaaccatccagcttcagtcagagttgctgcacttcaggtcccaggctagacttcagcttaggcaagagtcagagttttacagccagacaccacaggcaggatttcagaaccagttggccttactcctcagctcctccatttattgctgtatattctggggccaattaaagactctctctcccttccctttgcttatgtacacgatgaggagaactctaggtgttcaggcttcttgtgggtggttaacaattcgaaagcacctggcatgcacctccacatgaatgatgacgatagaatcgtaattattattatcagtgttactcttgtggctggggtatcacgtttgctgatcttctcttgttcatgaggttgaaccaggcaagaccgagcttgcacatcattctgacccattgggcttccctgtgctcgtcctttcctcatgctgtgctgcctgttttcttttccacagttatcattacctattgtttatttctgcccctttgtttcacttaagaaagcctatacaaacgggattgagaagatttactaaacttttgtatgaatttacacagtttatgagtctgcagcatgactgtttaccactttaaagaaatcttgagactaaaaattttacatatacacagttgtgaaccctaccctcaaaaagagtgggctgggcgcggtggctcacacctgtaatcccagcactttgggaggccgaggcgggtggatcacctgaggtcgggagtttgagatcagcctgaccaacatggagaaaccccgtatctactaaaaatacataaataaataaataaaaataagtagggcgtggtggcacatgcctgtaatcccagctactcgggaggctgaggcaggagaatcgtttgaaaccgagaggcggaggttgcagtgagctgagatcgtgccattgcactccaacctgggaaacaagagtgaaactccgtctcaaaaaaaaaaaaaaaaagagtggtgttaggccaggtgcggtggctcacgcctgtaatcccagcactttgggaggccaaggcaggcggctcacgaggtgagaacaagaccatcctgtccaacatggtgaaaccctgtctctactaaaaatacaaaaattagctgggcatggtggtgtgcgcctgtaatcccagctacttgggaggctgaggcaggagaatcacttgagcccgggaggcggaggttgcagtgagctgagattgcgccactgcagtgagctgagattgcgacaaagcgagactccgtctcaaaatacataaatagataaatagtgctgttttgtacttccagaggcgtaaataaataaatagtggtgttttgtacttccggaggcatgacgcagctagccgcattgcacacgcagccctgtgcttgtgtctcttgatttgcacacgtacactcacatgcacactcatgcaaacacacacacactcatgcacacacacactcacatgcatacacatgcacacacatgcatacatgcatgtacctgcgcggttcttacgtctctatcttctcactgcattttttgtcttctccagtaacaacatgtctgctgtttatttgttcctcctccaagtttctctttcttttctcttcctctgttatttctctcgttctttccaagattggaactattaggctggacttggaagtgaaaatccttttctcttgtggcttttggcccacaacacttgacgttgaataattcttagatgtccttatacccaataagccctcaataaataatgaatgggtgccttagccttgttgaccaagatcatttgactgtgccttttcataggctgttttttggttaatagtgagaagcattttgtttttttgaataatttttcttgcctgctctcagggcgtatagactgaaagctattcatcacataatcatttttaatattgctgataaaaagtggcaaattctatgtgaagcatatcagaaggtaaatatgattccttgccttaagtttacttatgtctggaggggaaaataaacaattctcagaagaatttttataattaaaaaatcgatttcattttgaattttattttgacatttgtagaaataatgacagtgtcagcatgtttttgtctcttcatctttttccttcattccttttgctacatcggacttctggtatcaggcctgcctataccccaaagcctaggtccagaccagcacaggaaataggctattttcagtagccttatctctgctttggtttctgatcacttgatattcagagtctcttatctacagatcacaagatcatcatctcccatcgaaacctgttcaaagaatctagcaaatctttgaatcttgtaatatggccttccaagtaaattgttttatgtttgcccttaaagttttctttgaacatagctgttattaatactactttcaacatttacatttaatagaatatttttaaacatgggatttattggcaataattttaataccttttacaacaactttcctgtgatttcctgggaaaccataaatttatactgtaggcttgaatagatccatttttaacaattgacatgggatttggtgggtttatgctaaaaattaagtaacctaacaaagaagtatagtgatttctaaaaaaaagcattcaaatatattttcacaatttagtcattcaacatgtgcaggagagaattaaatacatgtagattactcttcctgacagattctagaagttgggtatttgcaatgtcccagttgtattattggaaaagaagtaagatgtattatgctggcgtatcttccctttgtcgttcttaacattagtttaacgtggatattctgcctatggtactatgttatgtaaatatttctgtactttgttctctcagataataagtcatttgattaatattgttccagcttcatataagtggcaaagggcgtttctgttactagtaaaacaaatcagctatcctggaatcacccacattacctttaattacattctaattaaatttaaatttgctttattatggtaatggatgttgcaccggaaagctggtgggaaatcagttatttttaccccatcattgtaaaagaaaggctaacctacatctataattatggtgacatttttaatagatgaattcatatttgatgtttcaagagtaaagagtctaggtaatctagtagtctgagagtgcaaactgtgctctttccacacttgccatcagtttatggttttcagcttggttctagaattgtctgccaatatagtagccgttagccacatatggacagtcccaactgagttgtgctgtaattacaaaacatacacccaatttcaaaaacttggtacaaaaaaagaatgaccactatcttattaatacctcctatattgattatttgttgaaatcataatattttgcatctacataaaatattaaaattatatctgcatatttttacttttttatcatggccaccagaaaatttaaaattttatatgtggcccacatcggtggctttactagtccttctattgggcagcactgttctagaaactatgttataatagggagcttgatgttggcaaacatagggaaatgcatttggacaaaactgattcaaagtgtgttcaccagatcacacaacttagtgtcattaagtcctcttctctgaagccagtagtttttcctaatgcctttacctaaaataccagtgaagaaggagacatcatttgtttgcaaacagaaataaaactactttcccatctttgcttcacatcatggtgcttccatacttgaaatatccagttgtggtaagcatcctagcaaagggaaaggcttaaaatgacttcagagtagataacatgaccaaggcattagtattttatgaggatacacttgtacaagttaggacttcctgggttggaaaaaataaaattaagcaactatgaaggggagagaataggtttaaccatgttttctttgaaggacctgagtaggaaagactgatataaaaataagtatgagaatattttccttaattgaataaccatggccaagtcaccaaattccaaaacaccacaactataggtttctggagtagctggctataattttcaggccacacacacatttccagtatgttgaattctaccttgttctgaacagcttcggaaatatttgttcaacttctactaagatatatatatataaaataaaagtttggggccgggcgcggtggctcacacctgtaatcccagcactttgggaggccaaggcgggtggatcatgaggtcaggagatcgagaccatcctggctaacaaggtgaaaccccgtctctactaaaaatacaaaaaaaaaattagccgggcgtggtggcgggcgcctgtagtcccagctactcgggaggctgaggcaggagaatggcgtgaacccgggaagcggagcttgcagtgagccgagattgcgccactgcagtccgcagtctggcctgggcgacagagcgagactccgtctcaaaaaataaaataaaataaaataaaataaaataaaataaaagttagagtttggactgcatgttctcactcataggtgggaattgaacaatgagaacacttggacacagagtggggaacatcacacctgtcttggggtggggggtggggggaggggtagcattaggagatatacctaatgtaaatgatgagttaatgggggcagcacacccacatggcacatgtatacatatgtaacaaacctgcatgttgtgcccatgtaccctagaacttaaagtatataaaaaaaaagtttgagtttggaatgtcttcctctataatgtggcagaggttaaagttacaaacaagttttaggtgtatttagatcaataaggattcattaagtgtatcttcctagagttttcctgttattatgtagtcattccatccacaaagcgttccccagtgtcattgacttgatgtgcatcaatcaatctgactgaatgtcaggaaagtatttattctcaatgttcttatggaccaggtgcccagcaaggatgcttattaagtgtcatatgatgattgcactgttagatcttcttcaatcggaggacagaccaaaaagatggctgcaattccaattaggggactttaaaaatcaattccaaaaagactagtgttctaataattttagtactagaataaaatgaaaagctacaaaagtactaccagatttgggataacatatgtctaaatctgtattagtacatatgcatagattattctgtgaaagtaacagaagtagatacatcctttagtttttgcacttctgtataatttatgaattctaataatgaacacttataatgtttactgtggaaagttttaatgtgtaaaaactcagaaaacatatctaatagtttagtaaatggcaaaatatattttattaataattgcagtataagcaattaattgtaaattgttttgcagtggtgaggagtggaagccacaggttagaaaggaaaggagaacatatagcgggaataaaggcaaaaggtctactgcagttattgtaacaaatggctctatctatgataacttccagcttaaaaataaagtgtggaggcgaggtacagtggctcacgcctgtaatcccagcactttggaaggctgaggcaggtgaatcacctgaggtcaggagttcgagaccagcctggccaacatggtgaaaacccatctctactaaaaatacaaaaattagccgggagcggtggcaggtgactgtaatcccagctactcaggaggctgaggcaggagaatcgcttgaacccgggaggtggatgttgcggtgagccaagattgtgccactgcactccagcctgggtgacaagcaaaactctgtcaataaataaataaataaataaaaatgaaaataaataaataaataaaaaatagagtgtgggctgggcgtggtgggtcatgcctgtaatcccagcactttgggtagccgaggctggccgatcacctaaggtcaggagtttgagaccattctggccaacatggtgaaaccgccccaccccatctctactaaaaatacagaaattaggcatggtggcgcacacctgtaataccagttactcaggagactgaggcaggagaatgacttgaaactgggagctggagtttgcagtgagccgagattgcaccactgcattccagcctgggccacagaatgagactccatctcaaaaaaacaaataaataaaatttaaaaataaataaacaaaattaaagtgtgaatgcctcaggtgtagctttgcctcaaactagcaccaagtatcctctcaaacccaaagattggtgttttatgcttgtgtttcattttgtcccaaaccatctagaatgtatgcttcacaagcatacttttttttgagacagagtttcgcagtgttgcctaggctggagtgcagtaatgcaatcttggctcactgcaacctccgcctcccgggttcaagcgattctcctgcctcagcttcccaagtagcgcctgccaccacgcctggctaattgttgtactagtagtggaggcggggtttcactgtgttggccaggctggtcttgaactcctgacctcgtgatctgcctgcctcagcctcccaaaatgctgggattactttgcctaagttagctgctgtgtccacggtgcctaaaacagcgcctagccatagcaagcattggttgagtgaatgaaaatgtatacttccttattttttagttcccttttcattatatcataaaatgtcaaggacatagggtctagaaatctgctgtctatgcagcgtttaagtcctgagtctgatgtctttgtccagaggatgtcccagtggccgtgggagacctgtcattgatagagagctgacttcctcacgagatgcttcactttcgcaggacagcactgatagtcaggcctttttatggtgaatcaaaatctgtcctcatgtagtttcctagtcctgtgccctaggatcgtgtaaaacaggtttactatttcttctgcatacctgctctttgaatacttatggacagttagctccctccttctctaccattcacccacactttctttttttaaattttttatttccataggtttttggggaacaggtgatatttggctacatgtgtaagttctttagtagcgatttgtgagattttggtgaacccatcatccaagcagtatacactgaacccaatttgtagtcttttatccctcacccccttcccatcctttcctgttgagtccccagagtccactgtgtcattcttaggcctttgcatcttcatggcttagctcccacttatgagtgagaacatacgatatttggtttgccattcctgagttacttcacttagaagaatcatctccattcccatccaggttgctgcaaatgccattaattcattccttttaatggctgagtagtatgtgtatgtgtgtgtgtgtgtgtgtgtatacacacacacacacataccacagtttcttgatccactcattgattgatgggcatttgggctggttccgcatttttgcaacctggaactgtgctgctataaacatgcatctgcaagtacctttttgtagaatgacttcctctgtcacccacccccccctgcaacccccccactttcttaacattccacaaattcttcattagtgtcagtgttttagcaacaccattggctgttgcagcaaggatcctcgtgtccatctcgaccgcctcctctgaacttttcttatagtgtggtgcgtgccttcaaacacagtagtcttaagtgtggtctgagcacaggctgattacttccttgtaaatacaccagaaggtgaaactagtttctgtgatcactatatcacaatagatttttatagagtactgtaaattaaaatccctaaggaatgtttatgagtggatacattccatatttcccccattttgtaaatatgtagttggtattttggattcattggtaggacctcatatctgcactaaatttaatttaaagaattcattccagcctttgagatacctatcatctcttggatcctgatttattatttcttctgttttttcccctaaaattctcatatgattttgatagaagtacattctgtatatatccatccaatatattaatttaaaaataatgtcaatggtacagggcagagatctgaaatgttttacgggaagacttatgcacccttctaggtaagagaccacacttaattattttattactctagcctcaagctcagtacttggctggccggagctgctcaagaaatatttgctgcattgaaagagctgttgaacatgcttaagctgtcttcatctaaccactctctagtaccaaacccatcagctgggctaccatccaatctgcattcctgcatgttaaagacaagatataatgagaaactttgccaaatgccttggtgaaatgtgtgtgtcctatatttatgggattaccgaacagtttagaaatgatatcctctgttctgtgcttgcaagccaaattgccatatgctctttccagcactggacagacactgagtaaatgtcaatcaaatgaattcatttttctctcagtccagttattatatgcaaatattaatgaacaaagatctttctgggtgccactcaggatacaataaaagatttcagttttctcattcacttcaacatttgtagcatgtctcttctgtgccaggcattctaattagtgagacgagggatgccacccaagtgagggagaatgttctatttattgattcggttgttatatatggagcaatttccatgttccacgtattttattagtccctgtgaatatacagaggcaaagtccctgtcctgtcggggcttacatttaacaaagagtaagttaacaaagtggtgataagaaccacggtagcagtaaacaaggtgatgagagagtagttagggaggctgcttaattagggtggtcacaggaagacctgtgcagctggcatttgagatactctctagaggctgtgaatgagtcatggaaagataggaggcaagagtgctccaggcaaagggaacaacaagtaccaaggtgtaaaatccagcaaggggttggcttcttccagacacagcatagcgggagctcggtgggcggcgtagcgggagcgtgacagggggttgaggctggaggacaagtgggagccaggccgtgcagccctgtaggctgcagtaaggagtgtagattttatcctgtgaacaatagaaggccattgaggcctttaaagtaggaagtgacgtgagttttttcttgtgtcaagggattcctctgactgcctttgggagtcctgttctgagagtattgctctgattcaaaagacagataatggtcacgacaatgcagatggagagaggtagagaaatctaataaatattttggagatagaaccaaaggctcaatgatagggataaagggatacactgatgacgatcgctaaatttttatcatgagctattcattcatggtgctgtttcctcattcagtggaggctggatgaggagcgggtggagtgggggcagtcactgatgttaagtaatttaggagagcgcatgataagtgcttgaatgaatacctcccatacttcatccatgtggtatactacacattcattcttatttattgagcagctagtatgtgccagacattggggatagagtagtgaacaaaacgaataaatcttgattttcatgatgaattgtgtttgatattgatgaaagctgtggagaaaaaggaagaagggaaaaaggttagggtgtgccgagtgaaaggattgattacgtgtgatttttaaacagcactgttgagaggccttccataagaagtcaacattttagcaaagactcataatactaataaataaacgtaataatagaatccagggaatcataatagttgggctcagtgtatttttcctaaccagatttgttaattttttcgacctatttttcttttagaagttggggataaaactgggagatgacttaccagctgcttatttattgaaacgaggtaaccagtgtatataatatatccataaacgtgctcttagttaccttacttagcagtgatgaattacccaaatccacctagcctttaataaatgggtagtgattaaaagaaaaaaaaaaggaaaacaaagagcatagtggtatctgttttattcttcagtagaaacagatgcaacaatggcacattaaaaaaaaagcaaaagtgaaatggatgtggtggctcatgcctgtaattccagcactttgggagaccgatgcaggaggatcctttgagcacaggcatatgagaccagcctgggcaacatagtgagactcctgtctctaaaaaaaaaacaagaataaaaaaaattgccctgtgtagtggcacatgcctattgtcctgcttactcttgagggtgaggtgggaggattacttgagcctgggaggtcaaggctgcagtgagccatgatggcaacactgcacttcagcctgggtgacagagcgataccctgccccacctccctccaaaaacaagacttgtcagcatctattcaaagttaataatataatgcctgggaatagattaatattaaatgttagcacacaaagcctattctgcaaatgattgcttctgcctcctgaagacaaggccaagtacatttcactccataacacaggttgtaaggaaaaaaagaaaggcaatggaaagtgttattttcttgaagtaatttatcacagctattgcctcctcaatacatgcataaacttccacatcatcaaaaaaggtagtagctgtttctgcaatcaatccagaaataataagctgggcatgtttctttattaacttctgttataaacataaaaatatatatctgcaagtatgtcaaggaaagaaaaatattggtggttctgatattttctttcaacactttgttatttggagttgtcgtcttaagaaataacatgataaaatattgatatacaaaaatacattaagatatattagtcaccatatattcaaggattgcagatagcatgagagtgtgagatgttcttgagataactttgttaaattcttaaatatcacaatataccctcctgaatttaattttagaacatttacaggggcaactgaaacctatcaaagaatttagccaggattatataattatcatataatatattttctaaatgtccatgtcactgtgtgtagatcaaatcagcattcagtttcttccctgccattgtcacttgacattatttctataattaaactaacattaacacttcctattctttcttgaaattgctaaagaaattacatttggctaagtaatacctccagaaaagaattattttgcattttgatgtctttggaacagctagatcatttgtttaatctgcttcttctgacatcctattagaatttcatttctttgatcaacattttcactgacactatttatgtctaacatgaaaacaccacagtatattgcagcttgaaaaatagtgttctctctattaagtgttgtgcatctctcataagaagagaaaatttggtaaagctgaaagtttattctgtaggtggccacaaactgaggttctaaaattgaaggaaaataaagggtaatattataaacagcaacaaaagtcagatgttaaatatagtggtgtaatataagaactagttgagagataagctaaccgccttcctagagttgcatgcaagcttggacagagttgatttcaccacttcactggtttttctttaaaatgttcatagaagtgatgcttggtaagactggttaattgggaacgagcttaaatgttgacatgattgttgaagttttcataagctcagggagttttaggtaaacattctgtctgctgggtgaggtgttgcagaatagggatatgttacatagatgcttgccctgagcacatcacagccatgagatcgccatggctgttgattttcttaaagtgtttttagtggaggagcaaatgcattaatatttattaagaaggaggagggggggctcttaaaacttgtatttatacacaaatttctttctttttctttttttcttcttcttttttttttgagacggaatctcactctgttgcccaggctggagtgcagtggcgcgatctcggctcactgcaagctccgccttctgggttcacgccattctcctgcctcagcctcctgaatagctgggactacaggcgcccgccaccacgcctggctaattttttttttttttttttttgtatttttagtagagatgggttatcactgtgttagccaggatggtcttgatctcctgacctcgtgatccacacgcctcggcctcccaaagtgctaggattacaggcatgagccactgcgcccggccatttgtagacaaatttctaatgaaatagaatgtgactttgaaagtttgctccattacatattagtgctatattttaggaaaactttagaatttttaaaatcaaagttcaatttttccttaagaaaataaaagttatcataaatgattaaaaccttagaaaagtgaatgaaatctttatcacttaattacagggcagtggcaaagttcatttatttaattttcatatgttgacatctatttttgtgtaatagcagatccctgattcccatttatagagatatagtcaattttgattaaagaaagacctaagtgtaaaaaaaatagtaatcgccttttaatcagcatctgcaaatttaagtgaaaaagtaaacaatgattgatttcttctaagctggcatataaggcatcaagaattgttagaattttttgttgaaagtacttgttatgtataagcatttacaaagcttaaacgtcacctcatgatctcatctcaaaaaaaggtcagggcagtctttgattaaaataaaataaagactggtattttgatttcagtttaagctttatttttatctttaaaatgtgcttattaagtccccaaaaacaacaacaaaataacagcttcagagagtaagaatgtaatgcctaagtcaaggaaatgatagacagtgtcaggaactgtgaagtatctgagactttatccctcttgcaggctgctcacagtttcatggatgccaatcttgaactcgagatgcctttgtgagaaatcatatacagtcactcagctggtgcccaatctaattaacagcacacacttgtgaaccaaacattggccccaagacatgagattcctgggtcagggagctggatagtttattacttgccccatagcagtagtcacattgtcaacatctccaggccccagtttccacagggcaatgtgaagtgacacctgcacacacagcaggatgtgttaaaaggagaggaacccggagctcagggaacccgaatcttttatgacagacaggaagcacttctgccctttgatccagaggaagacactacctttgtcttataaggatgcttcctatacaaacccccttggaaagctagtccagcatagaggtagtgaggtaagattgcagaaggccggagacccatggagaataatctcctaacagaaagatttgggttttgtttcttattagacagtgttaatgttacagtgattccatgcaaaactttgtgcttggaataatcttgagtataattgtggttgtatttccatggtaagtaatcatttgcaataggttaggaacattctcatcatttaataacagaggaaactacaaggagagttaaatgatttaatacaaactcaagcagaccctttgtatcaaagcaagtactaacatgctcaaagatgacgtggtttttttttcgtttttaatttttaattgttttttttgagacggagtctcactccgtcacccaggtgggagtgcaatggtgcgatctcagctcactgcaacctcccgcctcagcctcccaagtagctgggctttcagtcgcccactaccacacccagctaagttttgtatttttagtagagatgggatgttgccatgttgcccaggctggtctcgaactcctgacctcaggtgatgcacccacctcggcctccaaaactattaggattacagacgtgagccactgcacctagccaaagatgagttttaaacatactgcactaagtaaggttttcattcaactcctaattttgcagttcaagtagatagatttaaaattatctggtggatccgtaatatttttgttcagtttaaaatttgggaagtaagcagccgtctattgaaggatataattatcattatggatggacttgtagaacaatttgtgatgagaaggcaagatacacattagccctcttaacctgaaaatgtagcctcacatttatattgggggagactatacatgtacgcacacatccacacacatccacacatgtatacacaccatacacatacacacacaccttggttataaaagccaggttgaaatgaaataggtctgatgttttgataattccatcaatttacatggttgaactcaagatgcctttgtgagaaaccatatacaatcactctcaatctaattaacagcacacatttgtgaaccaaacattggtctccattgtgcagttcataatcatgaaacaacttttagaatatctttcaattcaaaatataaacatgtagatattttgacattttccttttgaattttgtgatagccaggatatttttgattagttaacatgttgtcttaatattgaaagatgaattatttacgttgtccttttgtaaaatagaaaatttagctcgttaaaagtttcatgggacagctccagagttctcacagttatataagactctgcctgctctctgctcactactgtaaatacctccatcctataatactgacaacctcatggctaatgaaaatacactgttgttgtctaaaagagtaattcctaaactgtgtctttaacctgtagcaataaaaaacaaatctctacctggaaatcccctacttatttttctctatcattcctatattttcccttatctctgaaatattttgaactactccagcttttagccactcttcttcattgtctctttttttttttttagacgaagtctcagcctgtcgcccaggctgcagtgcagtggcgtgatcttggctcactgcaacctccacctcccaagttcaagcgattctcctgcctcagccccccgccccgagtagctggggttacaggaacgcaccaccacacctggctaatttttgtatttttaatagagatgagatttcaccatgttggccaggctggtcttgaactcttgacctcaagtgatccacccacctcggcctcccaaagtgctggtctcttctttttttgttttcttttcttttctttttctttctttttttttttttttttttttttttttttgagacactttaactctgtcctccaggctggagtgcagtggcacaatctcagctcactgcagcctccacctcccaggttcaagtgattctcttgcctcagcctcctgagtagctggtattacaggtgtgtgccaccacgtccagctaattattgtatttttagtagagatggggttttgccatgttggccagactggtctccaactcctgacctcaagtgatcctcccgcctcggcctcctaaagttctgggattacaggcgtgagccaccacacccagcctccttttttttctcttcattcttaaaacatttggtgtggtacgcatggcacaagccctaatatagcatgtatcatattcttgtacataattctgttgtaatatctctgtcaccaggctgtgttattcatttttgtaatatcactttctagcactgtgcctagcaaatagttacttattcagtaaatatttgttgacagtaagaattgaatgaattttaatgtcaccagcaattaggtctaaatcttattcatacttactttagagcatatggaaattagaacagtgtgagtaatttgagcaaattatattttctatattaaaggttgaaatataagtctacctttttcataccattagtactatttcaggttcttaaagcacttctaggtacagcaactgtgagatatttaacagaaaaactttgtcacattataaaaacaaactctaaatgtgaaagatgatgtttacaaattttgtaagtttcttctcatgattacagttttctctaatagatgaaaataggggaaaaaacatttaaagtgaagtgaatgcacattcattcatccgcttatcccaaaagtactaagtcacagtgttttgccaagtactttaataagtgatgggtatacagagatttggttggttttattttagggagggacagcggaggagatacagttttactaagatataattcacatactataaaattcacccatttaaattctaaaattcattgtttgttagtatattcacagagttttgtaaccatcaccacagtcaattttgattttcatcactcccaaaagaaacccacttccctttagcagtaactcctgtttctccccaaacactgtccaccaccaccttaggcaatcactaatgcactctctgtgtctatagatttgccaactctagacattcaatatcaatggaatcatacaacatcttatgactggcttctttcactgagtacaatgttttcaaggttcacccaggttgtggtatgaaccagcacttcatcctttttcattgctgagtaatattccaatgtatggatacaacaaacacatgcatatatcattggttaattgatgagcatttgggtggtttccaccttttggctattaataataatgctgatagggacattcatgtgcaagtttttatttggacatatttttcatttctatcaagtatatagcctaggagtagaattgcaggatcatatgataactctaggtttgagcatttgagggattgctggactgttttccaaagtggcggtagcattttacattcccacctgcagtgtgtgagattccaccttctccctatctgttgagattttaagagaagattttaacaaatatttccaactagagcttctgaaagtaatgttggtgattactagaaagttccgaatcatttttgaaaatgcggctactttttatttagtagctgctaacatttactgagtgcttactgtatactatgcattaatctaagaattttacatgtagtcagacatttcatacttataacaactctgtaagatacatgtgaacagtattttacttttgaaggtattaaagcaagaaagttgagaagcagacatttaaactgaggtagtctggcttgagagcctctgtatttgccactggcttaaatctctgctgcgaagttaaaaatacgctcgtaaatgtaattttgtatttaaagattaaggataaaattgtattgtgaattttgatctgtgggccaaagacttccttttactgaccatctaactgacaatttcattaaatattaattaataatttttgctaagttaatataagatataaggtggtaatttcttgtactaatattagtaccatcatgtttttggattttaaatattatttataacttctgttttcagttcaggggagtgccattatctacctaataagtgcttactatgcacagtcttccaagcagattgcatgtagtatctctacagtaatatgatgctgcctttggactgtatctgcttcaatatttttaatgcatgaatcagtaatttctgttggctcacaataaaaacgtttatttctggccaggcacggtggctcatgcctgtaatcccagcactttgggaggccaaggagggtggatcacctggggtcaggagttgaagtcctgcctggccaacaaggcgaatcccgtctgtactaaaaaaacaaaaattagccaggtgtggtggtgcatgcctgtagtcccagctactcgggaggctggggcaggagaatcccttgagcctgggaggcagaggttgcatgcagtgagccgatgtcatgcaactatactccagccttagtgacagagtgagaccctgtcttaaaaacaaaacaaaaacatttatttcttcctcttcttttattttactcaatataagtcatttaattttattcattttctttatcctaaaattagtgaaataaatttatcctattgttgcatggaaaatttatggatatttaaaaaaaagagataaagttacaagctgccactgggaaaaaaaaaaaaaaaggcaacaaaaagctaggactaattaattttactcacagagccagcaagctgtcccatctctgggaggaaaagacacgtactggaaatatttaacagtggaatatatttatatagtactatcttttccttaaagtaatgctcctgtctgaggaaatatttttcttagatattcttacaaacctctattaatttaaaaaaaattttttttttttttttttgagatggagtctcgctcttatcacccagactggagtgcagtggtgcgatcttggcttactgcaacctctgcttcctgggttcaagtgattctcctgtctcagactcctgagtagctgggattacaggcacgtgccaccacacccaggtaatttttttttttttttttttttgagatagagtctcactctatcacccaggctggagtgcagtggagcgatcttggctcactgcaacctctacctcccaggttcaagcaattctccctgtctcagcctcctaagtagctggggattacaggtgtgtgccaccacgcctggctaatttttgtaattttagtagagactgggtttaaccgtgttggccaggctggtctcaaactcctgacctcgtgatccacccacctcagcctctcaaagagcttggattacaggcacgagccactgcacccagcctaatttttgtgtttttattagagacggggttttgtcatgttggccagactggctgtaattcctcacctcaagtgatctgcccacctcggcctcccaaagtgctgggattacagatgagagccaccacgcccggccacaaacctctttttgattgaagcaactgagaaatataaaattgtttgaaaattgtctatataaaaatgagcaaagcagtatttataaaaaaatacttcatcattattaataagacaaacacaacacactcattacagtgtgagccccagagtttgtgtctgcatcactgaatggctatttggtttcaacgcctgactcttaagtttgggattttgtgtagtttttatttctttgtttgtattaatcagcctcattgtgattttagcttctatttctaaagttagtaatcttgaaattattttgctcatatgtattataaaacaccttgagaaaccatatacttccttgcacatttttaagttgatataaaaattttattataggtttaagtagttgcagtatggtcagattataaatattaaggttaaattatacagcaattgcatcattttaaaaatgtttttgggggatattaaaactgatgatttacccttcagtatcatcttgctaataatacatgtaaaagatgatttttaatagtctgaaatttgatattgtttcttttttacaaactttttcatttctattctactctcctgcataactttatcccaatgtaatatagttaatcttcatttttcacgggttccatatttgcaaattcaccaacatggtaaaattattccttgccccaaaatcagtactggaagcttttaaggtcattcacagaaatggcagagttgtgaagatttgagttgctcaataagcatgttctcagttgaggttgagtgttctgctttcttgtttcaactttcgtactgcaaacaaatgccctctttgaggtctatgtagtgtcatgtttttcatattttggtgctttttattggtgatttcattgttcgaaatggccccaagcatagtactgaagtactggctagtgttcctgagtttaagtaggtggtgatgtccgttgtggagaaatacacattatagaaacctagttaaggcattagttatagtgatattggctatgagtgcaatgttaatgaatcaataaaatgtaataaacaagctgtctttaaacagaaacacacataaaacaaggttatgtattgactggtggatgaaaatgttgtaaccagaggctcaaaggaacctaaccctgtatttttcccctaggaacaatgctttagtattcagcagtttactgttcgtggtgactttacagactacaactatagcctatagaaaataacaagaatcaactattttttgttttaaatatctttacacatcatctcaaaatatatctttgcaacaaaaacatgtataagaattaaagtttatgatatatttttaaattctcttgtaccataagccttagtattaatttctagtgaatcatgatgtgtcatgctatttttagtatacaaatcacttaaaaatataaatatatatttgggtgaatggtttcttggtatttttgacaaataattactaagcataaaaatattagaaataaatcccttaattagatgaatgggcttatttttatgcatggtaacctgtctgtggatgaatcttacttattgctggaatgaaatggattcagcatcattttgttcttccttttcattgttatgggtgtaagcccgtgttctaactaataagtttattggaatagaagagattttattatagcaacttcattcttttaatgtcttcaaaattgtaacaaaaatttattagtaatatttgtcataattactccagtgatctgtcaatttataacccaattgaatccatctttaattttgttgaaaataaagaatttgaagctaattacttggacaaaattatatagagacattcacctattcaatttctaggaaatgtatcaaatatattttataaagttttttttaactcacttaatttttcttgccattctatcatttagaggtattttgttcaatctgacaaattttgaaacattgggaaaaattgaaatgttcttcagtttaatacacttttgtcaatacaatatttataataaaattattttatttaacattttttaaatcaaaaccttggagctgcatattccatttgtggaaagtgaccgccttttgacatgatgtaaaaccaatctttttcaaatcagacagccaataggagttaatttttcagaaaaaaatgggcccccatagccatcttatatctgtcaagcaccacatagtaacatttcagtcaatgagggaccacatatatgatggtggtcccttaagattatagtaccatatttttactgtacctttgctatgcttagagacacaaacactactgtattataattgcctacagtattcagtgcagtagcatgctgtacacgttgccttggggcaatatactatatcatatagcctaggtgtgtaataggctatataatctaggtttgcataaatacactccatgatgtttgcacaatgatgaaattgcctaaggatgcatttctcaaaacgcataactatactacagaggagtaggtggatggatgggtggatggctggctatgtggatgtgtggatgaatgggcagatggacagatggatggttaggtaagagatggaactttgccagcagtttgtctcctgggtgatataagataccgtcatcttcagtattatagacaacaatcttagctctgatcttctgagaacttccctgaggaggaattacttctttggcaataccaaggggtagaagagctatgagagttaaatgaacatcaccatctctcttgtccctctttactgtgtatctgtattcataccagcctaactcaacccacgtgctgaaaacacagtccgaaatggctaaaaaatacatcatcgttcctaatgccaacctttaccttactctgaaagaaataaagctctactgtgagttaacgggttgggttaaaagaggctccccgttcccagttgttcaaggcatgctcctttaacaccctgtggtggtgcaccagagccaccgtgggggagattgagtgtattcctttgttttgtgaagtgggagaatgttgatttcgaagggaagctgggacaaaatgatccatcatgaaacagccataaatgtgtttccagacatatctgtttgaaggaacggtgtgtgaggaataggagaactttccattggcacgtcccatataccctcagggtaacatacagtccagtgtgaaagccactgacacagaggagggagtttaggacccaagattctttttcctgcttctttccttgtgaagtttgggcaagccacttttattctttgtgcatctgtttctttattttaaaaataggaatagtaaatggtctcccaattatctttcagtgctattgtgaagattaactgagataatgtctgtaaaagcactttgaaaattgagagctctatttaaacagaagatatcactatcagtatactaacgacactttagaccaattacaatttactataaagtgtagtggaatagagctccattgggaacacttttcttatttaaagaaaataaatggtacatttttaaaaccaaacattaatatggcacaactgacgtgataattacaataatttttacactatatgttggacctgaagttaagagtcaataattgctgaaacttaaaatgtgcctaggcactcttctaaatacctttcttatattgatttattaaattctcacaacaactttaggaggtagatactatgattattatttttgatgaggtacaaagtatactgagaacgtataccttataagacacaaaccctctctagttatcatccagtctttcttctcctttctttgtcatctccttccccaaagagttttgcccttattattatgtccactttctcatcgtttttttttggagacacagtctcactcttgtcgcccaggctggagtgccatggcgcgatctcagttcactgcaacctccacctcctgggttcatgtgattctcctgtctcagcctcctgagtagctgggattacaggtgtgcgccaccacgcccagctaattttgatatttttagtagagatggggtttcaccatgttggccaggctggtctcgaactcctgacctcaggtgatctgcccacttcagcctcccaaacttctgggattacaggtgtgagccaccgtgtctggccagatactattattattgcctattttgttggtaataaattgagagagagaaactgtgtgacatgcttacatagttggttaggatgggacagagctagtctgtgaacccacacagagggttctaacatccatggtcttagccacagtatacacgtcttattatatagattttcagttgcctttttcctacctctcattctccatctcccttaatgtggtttctactaaataattttaaaagtggaagaattaatcaaagaataaaaaaagagtatgttggggagagagagaaggaaaaagagagagaggagggaattctactggagatacaccctcgtcaaagaaccaaagctgtttccttgaggctatgcgcgatgtcctcatcagttgctatgttctaagaccagggtctcttactccctgaggagggtaggaagtcctcattctgtttccagccggggaacctggaagtggcaggagaccttgacattcccagtctggcccgatgcagtaccgggcacctcttccacctcaaggagggaaggagtgggaaggcttgggctatgattcttgagccttgcgatccaccttttcaagtggtggcagcatagtcttaagtttctctctttttgttttttcaaaatagttttgcctttgaatctattttttgtgatattaataatattgtcatccctgccttcttatgattacattttacttggcgtattttttattcatttattttgaaaccatttgtgtctttatatctaaaatgcagccctgtagacagagtatagctggacccacttccctctgtccacgtagtccctgccttttaattggagtgtttacttcattaaaatttaatgtaattattgatgtggtgagttctggtcaccagtttattgtatttttctatctacctctctatttttcttccattcttcattatctcctgccctttttggaaggattatttcaatattttttggaattccattatgatttttgcttgctttttgggtcaatatttttattcattttgatttttactataagaaatataatgtctgtccttaacttcttagtttcttcattgttaatattgctccacttcataaaataaataaaagacccatatttaccccgcacctattatgccatacttggcatacatattatatgttctaaactccccatggaatagaatttctgctttacccagtcatctgcattaaataaattatgttgaataaagcaaaaaaattcctacctaattatcttctgtatttagcacttatgatgcttttactgtttcttgtggatttgaatctctgtcttgtaccatttcacttcagcctgaagagtttatttgatatttcttgtgatatgagtctgcttgtgataaattatcttaattttatttaatcttaaaatatctttattttattctcatttttaaaagatattttcactggatataaacttctgcattgacaagcattttttgctttttgttttcttcctgaactgtaatattgtgccgtcacttctggactccattgtttctgaccagaagttaacccttaattacatcattttaaccctgtatgtgacagacaaacttttcttgttgttttcaaagcttgttccttgtctttggctttccatagtttgactatgctatgatttgccttgacacaagcacgttcatatttatcctgcttgacatttgttgaacatcttgaatatgtaaatttatttatttcatcacatattaaaatttgagggcattattttttgaaaaatttttctgccccattctttcattttttctttgtgactccaacaacatatatattagatcatttgatattatctaatatgtccctaacatctattcatttaaaaacaattctttattcttcactaatgctttcctctttaatctccatttgggtattaaatttatttaacagatttttattccaggcaattgtagttttagttctagaatttctatttgattctctctctctctctttttttcttttttttaaaatagagctaaggtctcactgtattgctcaggttgatctcaaactcctgggctcaagtgatctgcccgtgtgggcctcccaaaaaattgctaggagtgagccaccatgcccggcctgattcctttttataatttctatttctctgattatctgtcatatctttccactcattgcaatttttttttttttttttttactcctttaaggacagtaatactactagctcctttaaaattttgtttcctagtttcaaaattagagtcatttcagggttttgtctcacttgattttcttttctccgagaatggtttactttcatggttctttgaaatgttagatacttttaaaattatatcgcagacattataaacgtaattactggagacactgaattctgtaattttttctccagtgacccttggttctttgtttgtttgttttggaagacatttattttggttgatcttgaaaagaaaatctgttctttgtgtgcaagtctgatctccatctagatctttttctttaatatatatgaacatttattttacaacagttttagttttacagaaaaagatgcaaaaatagtacagggagttcccatgtaccccacacccagtttccctattttaaacttcttacattgttatactacatctgttatcattaatgaaagaatgctgatacattcttattaactaaaattcaaactgtatttggatattcttagttttaccgaatgtctcttttcttttccaggattccatccaggctaccacattgcatttactcatctccttaggcccttagactctaacagtttctaaagactgttcttgttttggatgaccttgaaaggtttgcgcagtgctggccaggtgttttttacaacgtccctcaattgcgttttgtgcgatgttttcgtgaagattagactgggcttatgtgtttttgagagaaagcccacagagataaattgcccattgcatcacactgtgtcaagggtaaacatgatcaagatgacttaccactgttgatgttgaccttgatcacctggctgcggtagcgcctgtcaggtttctccactgtgaggttgtttttgttcccctttccatgctgtattcttcaggaggaagacaatcacaggggtgttacaatcataggggcgtttacattcacagggggattacaatcacaggggcgtttacattcacagggggattacaatcacaggggcgtttacattcacgggcgttcatattcacaggggtgttacactcaaaggggcatttacagtcataggggcgtttacattcacaggggatttactgtcacaggggcattatacttcacctccttgagcacatccttcctttagctgagcaactttgagtctgataacgcaccttcatcattcaggggttagccagagacgtggatagatagaaatttgggtttctctttctgactcattttcttctgtgtctcctcggaggcaggtgtcccagtcttggtgttttgcttcttcagccagaaaaactgtggctttgcaaccaaagtgcctgctggcccacatgccatgtgcacggactgcacctggcttcaagcctaaagctgtgagaatgggcactccctttacgtaactgtacttctcctgatgtggaccccctaactagaaatcttcattttttttgttcactcttctatggcttttcaagaatctgctttctttagtgaagtcccaattttatagtagtttttttgcaggagggttgatccgatagcatttaataattcattataaaaggcaaaaatcctggcctctatgtataagtggggagatgaaatgaggcttcctgtcacaaagatcttcaaagacagaaataaagaattatgaaacaagctactagaggatggtatcatacagcatatactcaagtgctaaatgagtatgcaggtaatagttataaaaataaaaataaataataaaatataaaacataaaaatagcaattaaaaaataaaaaacgagctataaaaatgcttgtagctagtaataatgcagatccttataacaacccaatgaagatgaaattgcacatgcaaggtcacttaacattgagctatgagtccaaagatgcagttctagagatttgtgttccaccacaaattattgggtagggaaatagattgctgtagatgagattaggttagaaatgaaggactaccgttaacaaaatttattgatggatcaaagagggtaggaataaggcaaagcactaagacaggtgtaggaagagaatgtttattttatttatctactggacatccgtgtagatatcaaatgctagtagatgcaattatctgaagttccagtgagggccaggtgtggtggctcatgcctgtaataccagcacttagggaggctgaggcgaattgatcacctgaggtcaggagttcgagaccagcctggccaacatgaggaaaccccttctctactaaaaatacaaaaattgctgggtgtggtggtgggcatctgtaatcgcaggtactcgggaggctgaggcaggagaattgcttgaacctgcgaggcggaggttgcagtgagctgagatcgtgccactgcactctatagtgggagacagagtgagatgagagagagagagagagaggaagggagagagagagagaggaaaagaaagaaataaaggagggagggaggaagggaaggagggagggagggaggaagagaaagaaagagaaagagaaagaaaggtccagggagatggcaagtctggaaataaggatttgggagttgatgacatatccattgcattacagccacgggattagaggaggtcacctgggagaatacacagattcagactcctgggatgctccaaaatctgcagggccaataaagggagagaatccagaagaggaagctacaaaagtatgtcctcttttgtaggggaaaccagaagggtttctctggcgggtgccaagagaagaaaggatgatgagaacagaagccaactatattgaatgtccctggaaggtcaacctgataagaactgaaatgtgatgacaggattgaagtgtagagctcattgctttaccaagagcagtcttcaagtgttggctcacggaagagtataaaataaagaaatggagaccagggtgataagaaattctcaatgaaaatttctatatagaaaaatggggtagtaatcgcaggagggtgtgaggacaggttggttggtttgctaaagttagggaatactagatttagtgatagttctcaaaggtgcagaagaaacttcccaggcaagggacatttggaaacatgtggagttacttttgtgttgccgcaattaaccggggcgtgcctctgatacttactgggctgcaggtggagccgaacatcccacggagcttaggaaaccctctcatgaggaagaattgcctgccttcagtgcactgagtccatttttgtgctcatgttaatggtctatcttgggctgtgattttctttgggtctctcagcaaaactgtctgaggcatcacatgatgttatttgccatctaaaaggacttcaccgaacctttgacagttctggatatgactttgattagtccaccttatgtcacctgtattctgcagaatcaatcactggaacaaggggagtgccaggcacagattggcttgcatcatccctgaaccaatcatttgaccaatgacaaggaggatggggctgtgctgatgaatgacattgctcttctcagtgcaggaggcggaatggctgcttgaggagcagccagaatcatttaagaatcattaattattgatattgactactatatttatgaagtttataccctggtcagacttggtaaataaaattgtcttaaaagaaatataagggcccatccaccaataaccctttcccctcttcccacccattcacttccttactctctgggacttctcaaccctggttagggatatcataaaaaaggaatctggatatatctcattatgttttttgttatcagtgcattatgatgttgattgataatacacatgattgataatgtttactggtatgttgtttgtttctgatactatattatacgtcatcaaaacaattattaaaacaatgcatttccaagcttttcatatgtaattaaaccttagaaagtagaggtgagccatattctctatcatatctcttggtctctggaagttttctgtccaccaagaggagcagaatccagaaaaattggctactttatttagtatttacccacatcctatctaatctcccttagttaccatgcaagcaaaggacactgctttcattagctctacctcctctaggtgcctagaatagggaactatttttggagcacacacttgcccagcactaggaggataggccctgtactagtctctttctgagattttctaatacatccataatctcaataaatcttgtgtaacagacattggtgttgcatcccttataccgatttattagatcaggaagctaacagtcaaggtggccaggtaacttgtcataaaattagcaagcgttacaaccagcattcaaatttctctttatgtagctctaaagacgttctgccttctgtgactttaaagaggtagtaggtggggagaactgggtacttccttccactcctgttttggaaatcatggctggagttcaggggctggtacagatgggacatgacatgtttcccacatatgtcagaaaaaggttgagacccactcaaatcacattactgccattcagcactagccatttttcacataatggcacttgattatgaactcagtgagtttcttaagatgttttttcttattcatgcgaatgttttagttggtcaaatattatgtatttggtttatctttccattttaaatttatattgtatgttagatttactgttaaaaatattcatatccgtagtatttatgatttatctaaatactgtaactttaaatctgtaacttttctattatagaaaaaacttgtatatacttaggatttcagtagttggacagaggtatctttaatattttttgcagtttccctttacaaaaaaactctcatccttgcagtaggagttccatgatttgaacccctggagcaaaatcataaacttaggatctcctggaatttttatctggttttatagcagctttggcacaaattccagccacttcttcccacattccttcctatggtgttttactttaaatctattctcactagtagaaaatgaaatttagaactggggtcatatcttttgtccctatagcccctaacttgtcatgtgtcttttctgatgaattggttgtcttatggtctctgatctgaggatgctgtgaagatacctcagggcttccaatacatttttatttcttcccctctattttcaaaggcgtcaaatgaaattgacttaaaagtgtatcaaaagcaccttttcctccgtaattagtatttttcatgaattttctttatttggagcactttgtcactggtcgtccttcctttttctaaacactttccgtgctggtcagagatgtcaggcctttgttcttgtggtgccatctggaccacctgccctcactggagtgtcacgtctgttttggggcccatgttgttcatggttattgttcacggtcctttgctcttagctcctcactggagcttttatttatttgtactgcacacccatatagggaatatctgatttatgtcataaagcctttttattgttatctttttaatcatgagggatagaaatgtggacttttttttttttttttttttttttttttttttttttttagacaaggtctctgtcacccagggtgactgagtgcaatggcacaaccatagctcactgaaacctctaattcctgggcttacacagtcatcccacctcagcctccagagtagctgggactgcaagtgcacgccaccacgccctgctgattgtttaaaaaaattttttgtagagatggggtctcactttgttgcccaggctggtcttgaacttctgggctcaagtcatccttgccccttggcctcccaaagtgttaggattacaggcttgagccattgtgcctggcctggacttttcttctgagatggtttcaggaagcctattttagtagaaatggaatgagctttagagttagattgaaataaatttgaaacccagttccattagaaagtaattaatgtccttagaaaagtgggtcccattccctgtgccttcgtttattattctgtaaaataaggataataatagggacctgaccagatcactgggaggcttagaaaaaccatatgagagcacaatgtctggcacatagtaagtgcctgattattattggcattgtaatgattattataattatgatgaggtgggtcatctcacattggtattgagaaataattagctatagtactacatttaaaggaaacacagcagtaaataaacaataacacttgcccttgaggagtttgttatcttttaaagaaggcaaaatgtatatcaaaaacagctaaatgtccattatttttaaatgttacaagacgatagttttaaatactataaatattatttaatgaaccgaataatatggtctgtggtttatttatgttttcaagataagggaactgagacctaaagagggaggttaatagattgacccctagcatcctaagccaattaaaggagtctgtggggatttttcataggtcttcctaatgcttcaggatgttcttttaacccgtgtgctatcctgcttccatgaggaatgtggtgaatattaaaagacatatatagtaaatgccactggtgccctgaataaggaagatcaggcttttgcagtagctgatagccagaagcttcttgggggaggtcacatttgaagtgggccatggaggtaggcaggatttcaataggaagaggagaaggagggaggtcatgaataaaagcaagaagttgtgtgcagcagttttttgtgatttttttttttctgggagcatttagtttaaaagagtacacatggagattaatgaagaaaatgctggaatgtaggtttgtgctagatgaaagggatcttggagtctttcctcaccagccgacagtgtgagacttaaaggatttgagtggtgtgacatagctctgtattaataaggctcattttgcagaactatgtagggccttttggaggtgatggcgtggatcaagactccagttgggggctattatgagactctagaaaagatgtgatgagagcgtgacttcaagcagtgagagaaagaatggaaagtaaagggcagtgagagacgctgaagaggtgggacagcaggtgcagtgagaagacggcatgcagacagacagactagaggatgcagcctgggtctcacggggaacagtggcttcaataagacaaatggtgtcactagtgtctccaccccctccctgccaaaaagagggcaaataattgtcttcatagacccagtggagcattttggccaggaccacccaagtctagggctctgagccatagccccgagtgggtcttcactctggtctatagagcagcttagatttttttccattgctataccttgagtgctaacacatcgcctcctatttttattaagagggtcactgtggagggagtgtgagtgtgtacatgctgtcagagctgagtcttttcaataaactcatgggactctttcaattccaatcaagcaagtgtcctgctcaagtctctctgtttcccaggatggatgtcaaagggagaatgcaattttggtttgcaggtcactgacgaatatatgaaagggaaatctcgtgggtaactaactctgtttttcccaaatattgctctatagcattaagttttttgttgtaagtgaaagaaaatatataccattcactgaagggctgcgaggggtaaatcggttgagaaatgttgctatcaccatttaagggcttcgagtgatgctcactttctcttctcccttccaatttccttggtcagtgtttgtcaggttcaactccagccatggtttcccagtggaggtcgattctgacaccagcatcttccagctcaaggaggtggttgctaagcgacagggggttccggctgaccagttgcgtgtgattttcgcagggaaggagctgaggaatgactggactgtgcaggtgagtctcccttggcggccgttcttgggatgccgccagctccattgctcatgccgcctgcgctgccaatctgacattcatgcctgagatctaatagaataaatagtgcctggggattccttgaactttactccacactgcttcattaattctgaccttcttaattatgcattaaaacagcaagcaggaaagattggaagaacaactgcgagtgagaaagagagagagaaagaacacacgagctaggcttagtgaataaatgtctactgactacaggagcagcaaggcacaatttctgtgtctgttcaatttctaccttacttattccatttgaatcttaacgaagaaggattcgaataaattgttcccaatcaggctgctcagtccctgcactgtgaggaatttgtaacccaattgtgacccctggaggttagtgagggctgctgctatgctgcgctagaggaggtgtgggctccggggcccattggcaactagctttgggcactccttggccaggaccagaatcgcacagttctgcagctgatggggaaggaagcctggagcacaacaacagtatacctttgcatgaatttctccaaggttcagtaacattgtccctggaaataggcccctgcaacgtaataagtgtgaacgatgctctcttctctcctggccccagcagagcttctggcagcccactgctcctagccccatgaaagccctacacacatgtcattcggattggtgatttttgtaggaattagggggactggtgaggtgactgataataccaccatcacctagaactagagacccgtcctttgttggggaaactcgcaaatacaactcaacatttgttgacgctattctttgtgaatgcaagaaagacgaaacgctttctgggaatggtccctgtgactgtgaaggaccctgcagatgtatgttccccttttcttaaccagcatcaattaattgcactcaggtttacagctgtgtgggtatcactgctccgcgcaggggggctcctgggtcagagtacacaaagtccgtccttgtatctgcatcctttccctgtctcttgtgggtaacgatatttatggctttgtaaaatgctctcagaatttgggtatacaaagaagctacagaaatgcaaattgttcctgtcattctgcattgcatctcctgctgatggtgttgaggcacatactcgttgtgcacaaactgctggcctctgctttcaggcaatttggttttataagggaagtgcatgtgctaaaaagggttttgattttttttttttctatttcagtcaactaaaaagattttcactgtatctgccaacctctaaatccaaggatgtttccttcacaaataaataattttaaaacagctccttgaatcaaaacattttatattgccaaaaccttcaggttctaaactgccatttgtgctgattcataaaacaattagcgatttcatatgtagttagactaattgcttcagatgattgactttgcaaacatatatgcctaagacatgtgttgatttatgagtctattttgacaaacacttcttaagcacttccaatgtcctaggcttctcaggggatccaaaagagagacctaactcagcccctgttttcatggagactgctctttatttatgagccctaaaaccgagagaaatattagattgaaccatatgggattgccatttttacaggttcaacaatttcatgttgttcaacctaatagctataatataagaatatgaaacataactgccgtatcgcacctgaaaatattatgaagttttaaaggtggagaaaacacatctggttggaagtcaccaggaagaacttcttggatgaattgagttgaggtaggattctgtagatggaggaataggggaatgagcatagagaatgcttgccaaaaaggatgggttcttgttcttctagaacctgaagagagatgttgaagattggacaaaaaataaaatatgggctatatttcacataaccttgactaacttggcattgaagtttcattggtggggaactagagaaaaatgtcatgccatagaaggaaatgggaagtctgaagacccggtttggttgggggaaggatgctgcattgttccaacatgatgggagttgatgccagctgagtacgtgtgtttggagatgcctagctggctgttgagaacttgtgtctgaggacactgaaaaagaaaggttcatacttatggaacttctattaaatcacagttaaatgatttaggtgccgagaagttggcaaactttgttcatagaagagtttcactgtaaagactaggaagttacacatgtaattgcaaattgatggctatgttttctttaagtgtacaactggcagaattttagcatcctagatattcttgtataatcttagaacatatgtttacaactatttagtcaatatcatttagttacccattatcattacaggtgctatatttcacagtataagcacaaaatatctaataataagttgctgctgagaaaaagaagatggaccttccatatgagctacttaatgcttccattaatgaatgttaaatatacaccttggtgtcctgaagagaagaagagatggctggggtggtgtctatgcttgctgggtgtcttcctcctggtttcgtattctttatcataggtgatatgaacatatatattagcttatcatgcaaaatgagatattgtgagtataaaagaagaccctgtcaataattattccaggacaaaattatatgttgggagtgtcctaggaaaactgaggcaatggtcaccccacatactgagcagtatctctcacacttagtttcaccttctttgaggaggaaattagttttagtgcctcacctcaggtactttggggaactatagcttgagaccacagtcttatgaaatgtcataattttaaaaagcgagtttgtctatttaactggcaaagggtatttgtaagattataatagaattgatgtcacatctaaaaaattttcatagaattttcagttctgggagagcatatccacaggccacttagagaagcactgttagagtatagttattttcattacacactcatctgttcagttttgttattggcaagactttaagaactttaaaaaattaaaggaaaatggaaaaaatatagacattgaaaacgaatgatctggcacagattttgcttctgggaagctggagtaggcatacttttccctcttcctcccagcaactacactaaaaagcctagacattgcatattgtacagttgactcgtggagtcatggagttaggggtgccaaccgctatgtagacaaaactcatgtatacttttatctcccctcacactttaccagtagtctgctattgacgggaagccttactgataccatgaacagttgattaatacatatttttcatatgtaatatgtactgtatgcttataataaaaaaactagagaaaacattaacagcattacaaaaaggagagaggatacttactattcattaagtagaagtggatcatcaagattttcattgtctttgtcttcatgttgagtaggctaaagaggaagaggaagagggggagttagtctcactgtctcaggggtggcagaggcagaagaaaatctgcatataaatggacccatgcagtttcaacccatgttattcaagggtccgctgtacaagcttaggaagattctgaaagtagtgagaagaatgtggacagagtagggattttagaacccaaggaagaatccagaggtgaatttcttgagttttctttttgctacgttacctcagatgtggaactgaagaagctggcaaccaggaaatgtcaacatatatagacaaaaagaaaagagaagaaaaaagaagcagagaggaagggaggggcagagagagagagagagagagagagaagggaggggtaaaggaagggggaagggaagggaaaaggaagaaaggaaggaaggaagaaatccccaacaatggcctgttttttatccagaggactcagaaaggggctgcctagcaacatagaaaacatttagacaataaccagtctactccagccaaatgcaacagaaaaactgcggccctatccttgtccccaccaacactagtaaaggctgagtggagagcctcttgtttgaaatttctgaaataaaacactcactgatgggtttgacataagaatggaaggaacagagaaaagagtcagtgaactggaagttggaacatagaaatgacacggtccaaatggcaaagaaaaggtaggctggaaaaagaaaaaaggaatagagcctcagagacctgtggttctccaacagagcatttaaagtttgtgtcaggggattcctggaaggagaagataatggtgggcaaatgctcaaagaaataagtgttggaaacttccaaagtttgcaagagacataaagttatagatggatttataaagctgagtgaatctaaaacaggaaaaacccaaagaaacccacaccaacacacaacgtaattcaacttcttaaaactaaagacaaattttagatcttgaaagaagccagagaaatatcacaccttccctatagggctaacattgttctaattacagtggatttctcatcagaaaccatgaaggctagaaggaagtggcacaatgtttttcaaatgctgaaagaaaagaactgccaacctgtaatattatacccagtgaaaatgtcgttcaggaagaaagaacaaatcaatacttttttttttagataaagaaaaactaagcgaatttgtcaccagcagacctaccctaaaagaatggctaaagaaattttctaaacaaatgaaacaacaaaaaaaggaattttggaacactaggaaggagggaaaaacatagtaagcaaaaatatggttaaatacaatgcactgtttttctcctcttgagttttctaaattatgttagagggttgcagcaaaagttatagcattgtctaatgtagttctacatgtagaagaaacatttcaggcaaacataaacacagatgcaaggaaaggtaagatttctaaacttgacctacaaaatagcaactgcagtagagcatgacaagttaagaatgtataaagaaatatctagagtaataggtaaagtaggtaaattaaaatacaaaataaagacaacaccaaatgctggtgaggatgtggagaaattggattactcgcaaattgctactgggaatataaaatggtagaaccactctggaaaagaatatagcagtttcataaaaaatgacatatgtatttaccagatgacagagttatactcttagttatttatcctagagaaatgaagacgtaggtacacacacaaatctgtatatgaatgtttatagcagttttattcacattagcagaacacggaaacaactctgatgtctttcagtggatctgtggttcaacaaactggtacctccacaccctagaatattactcagcagtaaaaaaggagccgactgttgatatacaaaatatcttggatggatctcaggggaaatgtgctgtgtggaaaaagcccatccccaaagatcgtacactgaataattttatttatataacattctcaaaacgacaaaatgatagaaatggagggcagattcatgcttcccagcagttctgaagggggtggaagcaggtgagaggagggtacgactgtgaaagggtaacagaagggaccctttggtgacggccgtcctctgtgctgactgtaacaatgcttatagtacaattataacgtctagcttggcaagatgttaccactggcggaagctggggaaaaggtagctggcatctttctctgctatctcttacaactgcgttagaatgtgtaagcattttaatataaagttgaatttaaaaaaaacctaggatatctgtccactttcacagaggaattgaaactatcactttcttagaaaataagcttgctatttgtctctcttttaaagggagagtatgtattcaatgagtgatatttaacataagaaatgagaaaaataatttaattgattagcagacacatttaaagacttgttcatactaagagtacagggtgagtaaaacttatagagacattaatgcctctttcttgaagcctttttttatttatttatttattttttttgagacagagtctcgctctgtcgcccaggctggagtgcaatggcacaatccctgctcactgcaagctccgcctcccgggttcaagcgattctcctgcctcagcctcccgagtagctgggattacaggcgcccgctaccacgcctggctcatttttgtgtttttagtagagacggggtttcaccatgttggccaggctggtcttgaactcctgacctcaggtgatccactcatcttgtcctcccaaagtgctgagattacaggcatgagccaccactcctggcctctttcttgaagtcttaaacagaatttttagcacattatagatctgaatagacatgatgagtatttatttgcaaactctttaccaaatatttaaactaagcaaaagtaaatagttcttgacaattgtgtactccagttgtacatagtttttaaattgatttgttagtcatacattataattttaggaaataaatgagccagatcgggcacagtggctcatgcccgtaatcccagcactttgggaggccaagacaggcagatcacgaggtcaggagttcgacaccagcttgaccaacatggtgaaaccccgtctctactaaaaatacaaaaatcacctgtaatcccagctacgtggaaggctgaggcggagaatctcttgaacctgggaggcggaggtggcagtgagccaagattgcgccattgcactccagcctgggccacaaagagactctgtttcaaaaaaaaaaaaggaaacagatgatctgctgtggttatagagtaaacattagtaacatatttatgtaatagaatttagggatgtaatggcttcatttctgaactaaatttattgaaatttcatggttttttttggtaatttattcaaattttttttttttttttttttttttttttggagatggagtcttactctgtcgcctaggctggagtgcaatagcatgatcttggctcactgcaacctctgcctcccaggttcaagtgattctcctgcctcagcctctcaagtcgctgggatttcaggcatgtaccaccacacccagctaatttttgtatttttagtagagattgctttttctattgactataaaacagaaagaggctagtatcaatttagagcactgaatacatttccaccatgattttttgtttgtatataaaagaattctgcaaatgaccaatatagttcctattttaactgattataagataaaaggaggccaggctcaataccattatacccagagcacagtcacgcagtgatttatttctgtgtaagagattggtcatgtaaatgagatgctcattcactacaggactgatacaagcatcttctctctgaaggtttgccttgcaaatggaacttactgctggcctcctttatttaggcaaatgtacatatcctcttgagttcctccaaagaacaggtacattattatacgaactagtaagtgttgctacgtgtccgagtctagaatcaaagaatgatcatctgtacagggcaaatgctcactttgggaagaccgttatttcatctatttgtgtctggttgcctctacatgtcagaaagtatccctgaatgacttacctctttgcataattcagaactctcagaaatgttatttttctttgaaaggaagccttgacatttctgtgcccatgtggacttacaaaacatctctgaggattgccatcaataagcatagacttgaagaaaaaaaaaaagctaagattcttatagcttataagatgctgaagatatatagtctgtggattcatttaataggctctcatctcatagatgtttccattgtgattacactcacattccaaggcaagcaatgtgtgagagggtgaaactctgcagcaatccaatctccaaactcttaacataggatgcatcttattagggtacaggaaacctgataaatgacagagaagagatgccatactgaaactgtgttactgttcactgaagtcctagtttcagatattctgttgtctccattattggactaagattccatcatccaattgacctgatgttatctgagattttgcttaatacagtcatcatcctttagggaagaatttaagaaatgagaggttgtgtctatacacccaaaagctctgaacccaaagatgattcactgaaattccatctttacttttttccctttttactaagtcattgtaacaagcctgagatgactgtcaaggaacaataagattgtatatgagaaacttctttgaagcttatataccaaactcacttatgatgaatacatatgggagtatgtgtgctccttcattttctatttatatatgggcttgggtcatagctttaattaataagttaccattagtaaatatttattccagcattgatcttccttagatataagttaaatggcagatgaagttaaatgtgtgggatgtgatcctttatgttataatagtttatgttaaagtataactttagtgatgcccataagacacagaaaacacaattaaatgggaatgggagagtctggcctaatatgttgtgttaactttttttttcaaatattaggtttaatattgataaaaataaaattatcataaacaatttagcagcagaagttaaattaactgaaattcacattggacaagtgaagattgccatagtagcctttgtaaagcacagaaggatgggctgaaagatctttctttggccatgtgctaaatcagaggatgcacagactcatttgaatggaggcagaacatcaagtatttactgaattgttgggcaagcccatgatttataaagttggtgtcagtatagtgttctagtatcaattgtttttggatttttaaaaaatgttttagccttttgtacatatatgtcttcacacagagaagcatacattcatttggggaatgcatttcctgggaaaaattataatttttgtgggtgtacttgtgtaaactgcattggattgaagattttattctgtcattgaattttattttgcatggaatgtttcttgtcttattatttgttctggatactttgcattcagaggtgtcactcagataagatttaatatgtagactaattatggcacagaactctgctttttaaattaatagaatattctgacattagagggagaaatgaggaatgcgagaacccactgatgtttgtgttttgagtacatcacaaactcaatttcaaatatgtgggcttttgaaagctcagtgcaggttttgccaaggatattttctgctcatttttataggcttacatatttcaaagggaattgggtctgtgtgtttgcattccatctatgcgtaattcatcaaaaacattgttcagaaaacaggaaataaacacaaacatttgtttaagatagttctagtgttatttaaaccttggacactaagaacttcagaacctgctaaagtggttaattaacatctgcttcctcagtttacctgttttgtaccttggagtcaattctcattttgaggaacattgagatacatgctgttcttgtaggagcctaaaactttttatatgtttttttcattccaagggagttttatgatgccatcctacacatgtgcttattgctatatataaatgagaagtcaaaacttcaagaatgtcatacactagatgaaatcacttaagagttcaactagactttcaaatacactgttataatgaagtacagtagatatgaatcactctaaagtcagactctctgggaaggacaagtcatttaagctctccagtctttatttttctgatctatatgaagtgtagatagtaataatgcctatattttatatgtttgttttgagtgttatatgaaattttacctacaaaggactgacacataagcaaattttaacatgttattagtttaatttgatgaataattcacaaagaaaatataaacattttatttgtaatgcgcagtaaattcatcccacgatttattctgttttaaaacattgcaaaaggggacagatttaccccatgccaaattgcctattccacacttgaactaactgagaacagaatatatttgtgggaactcctttgagttaagtctaaacagttatcttaagaaaatactatattctattctaatggagtttacttttttaatgcactgaatgtatctgtatgtgaaattttatttgggggagcaattttgcaggagtacttaccattcaaaatctgtttaacaaggggcatgaagtaatttcagatttctcctaagaattcatgagtcgcttgaatgtaaaatagagggcaagaggatcaggaagcactctgaagagaaaatacattctaagacccacttaaatagttatatttttgcctctgtaattgataagcagaatgaagattttgaatttatatgatctgtcattttgtagtacactgaaatccagttgtgtggctttagccttgcagattaaatacatactaatctttttgtgtttgtatttattttaaaggtcggtttctgtttgtttgtttgtttgtttgttttagacggtgtctcgctttgttgccaggttggggtgcagtggtgtgaactcagctcactgcagtctccacctcttggattcaagcgattctcctgcctcagccctgctagtagctgggattacagctgcgtgccaacacacccagctaatttttgtatttttaatagagttggagtgttaccatgttggccaggatggttttgaactcctgacctcatgatccgtctgcctcggcctcccaaagtgctgagattacaggcatgagccacggcgcccagccaagcttggtttcttatataccaatctttaatattgcttatgtcatataatattgtatatagctggtgagttcatttctatcctttgccttcaactcaatggcattgttttgagggggaaataatgtatctgatttaaccaattatacattggttattcagccctgttcactgatataaacaattggaaatttttaaagatttccctgaagagggcatataagctttaaaatagacttaatcagttatgataaaggggggaaattcttctaatgattcatttcagtttattaaaaccatactattgaaacttaaatatcaaggggtattactttttgaaaatggcaataaattcactaattactttggagtcttggactgattagaaaacatacctatagattttgcattacgaatttgaaaaatataatacatttgttgataatcttttagggtttcctgcttgacttggtaaatttttaattcttgcctctggtggaggaatgtagtggaccatctcttattcaaaatgattggcagttttcttttagtattttgtttgtttttaatagaagagattgatgagagaactataaaaatatcagtctgtttctttaaataaatgagttttacttataaagagtgtttaacctataaatagttttgtttttgttttgttttgttttttttgagacagagtcttgctctgtagcccaggctggagtgcagtggcgcgatcttggctcactgcaacctctgcctcctgggtctcagttcaagcaattctcctgcctcagcctcctgacctataaatagttttacatatagtgtttttatagatacttcctgaaaaataaatttaaaaataactaaatgtaaaggactgacaacagttcgcgtatcacattggcccctccttaagtttctgtgcgcattgatgatatgtatctgttggttacgaagtcatctctctctgccgcattctcaattactatccattcaccacaaggctcaactactatccattctccacaaggcaaccaagtccatttttttctttttttttttagcaactaaatgggataaatgcagtgataagcaggtaaactgactctctataaatacaaagctctgattgtcactttggagtttccctgcaaaacctgccagccctgttttttttaagggaccaacataataacactgaaggcggcgttgggaagaggtgttccctgtccattcttaggaggcagcctgagtgggcccagcacacacaactggaatttgcttccttatctgagcacattgttcttccacccttagatttgttctgcccttttaaatcagaagaaatttttgtacataacactttctcagatacttgacgataatccatatgcccttcagttatttctcttcctattttagcagccatatgttttacctactttggacgaactccatttggtcttttctaaagagagaggactgtactagattctcaaagtggcctgatctatgctggagttactacatgccccttggtataatctgcctattaatgtggcctgtaatttatttttaggatcaatgatatgacttagagagccatacagtccatttaaaccccaactctgtttttacaagatatatatatatatatgtaagccagtttccccattctgtatttatacaactgattgttttaaaatctgttcactcaacggtcttttattgggcacccattatgtatcataaggtatgagccctgctcccaacaatctttcaggtcacagtgtacaaatatgtccacaagtcatagtgcatggattaggaggtgggccacatgggttggaatgtagcttatgccattttgacctttggtgcattagttaatgtctctgtgcctcagttcctctcctaaaatgagaaaaattgtgttatctacctcatggggttgctacaagggttaaatgagtcaccaaacagaaatacttacaagagtgccttgtacgttgtaacaccccatgatgtcagttgctggcattgtgattttaacatcatcatcatcatcgtcgtcgtcgtcgtcatcgtcatcatcatcaaagtgctgcatccaggaggcactgtctgctcccctaggctgagtcagtaaggcctctaagctgaggagaatcataagctgggaattaagtgatgaacagaagatttctgattttaaaaggaaggaatattttatgcagatattataaaataaaagatgcaaaggtctggcactactttagaattacaattatttgctgtgactaaacaaatggcaaaagtgagaatgaggaaggtgataccgggaagaggatgagccgggtcaaacgcagaggggctttgcacataatcttcgggaatttagatgcttccttggattctgttaataaatacttgccaagtgtctcctccacagcaagcactcctggttcctaggcctggagagcagtggtaagcaggaccggtgcgtccccacttttgtggagctttctatttgagtgcagactttaagaaaacataagagttctagagatgaatatgatcagtttgtgtcgtgggtgtgacagggtggcaggcgaaatggggcaggtggcgggccacttaggagactgtagcgtgagactaagccctggactaaggcagggccaataaagaaggccatgaaggccagggcttcatgagaagagaaatccgggtagaatctccagggccaatgaatggaggctgtggtgcaggactcccaggatgcaggaatgatgctgaggttgaggactcttgagttcctctttcactgctctagctgatcaagctgttaacacagcacctgtcattcttccggtgatgggtaagacagacaaggtcccttttcttgtggagcctgcattccatgtgcaagaaggttattaatgcttttagtcagagtgccatgaagataaaagccacgtgctaaaaggacagggcagaaggatagaagaaacttgggttgctgagggcatcagggagcccccagccagttctagatggcttttgtttagacttcttgtaacatgcgaaaaataaaccccaattggttatacttctgtagtcagtattccggtacatgcaaccaaatacaatcttcaggtttaaagcaagtaaagcaataaaaatggtaaatttcagttagtgataagtgcttggaaagaattaaaataggctgaggactggtgacactaccttatattggaaatttaggaaaagcttctcttggaaggtgaagtttgagctgaaagctaaaggagccagccctgggaatatctgcagaaaatcattccagagagagggagcaaaggacctagagtgggcattaggtaagcacatgccaaggccataagggaggtaagtgtggctggaagttggtggaagcaaggaggctaattgggaggctagtctaggtgtttgggggacggagcatggggcttcgctagggtactagacgttgtaatggagggacacatgtagctttgtgatgttttagaggttgtgtcaatgggactagcagatgtacgcattgtgagatgcaagggaaagagaaaattgaagtatgacacattgatacttggctatgtgagatatagaactcatgttagatgttgatgccaccaggcacagaggagagtggaagaaaaagaggaatgggttattgtgggaggggcagttcaaataaactttatttgagaggtttaaggtttcaaataaattttaggtggcgatctccagtaggaagtttgtttatctgtctgttgttgaggttagaacagaacagaaatataaatttgagcctcagtgtttgatacctagtgctaccaaataatatatagtaagacattcttcagataaagcttatttgagaatctatacatacattctcagtcaagatgaggttagatgtagaatctaaatcgagaactataatagaaatacatggaaattacattagtgactttgaatttgattagcatgcttgttcttttgcaagtctgacattagcaatcttgacttcctgtgcaagtcagatttccattacaagtcaaagatgaatgaattatatataaaccattgtataaactttgtagggagatacatatttgtaattgttattgcaaaaccccagggatggaaaacaatatgggaattatatgacaaatactagtgggcccaccattcaacttaagaaaaatattacaactaaaactgaagcgatggatgtactgctctctgattgtgttccatttcttccttctctacagaggtaactattatcctgaacttgggatttgtcattatcaactatgtttttatactttaaaaaatacatttattaccccgtctcaactaaaaaaaatgcaaaacattagctgggcgtggtctggggcgcctgtagtcccagctacccgggaggctgaggcaggagaatggtgtgaacccgcgaagtggagcttgcagtgagccgagattgcgccactgcagtccagcctgggcgacagagcgagactccatcaaaaaaaaaaagaaaaaaaaacatttatttaccagcctataagtaatatggaatactgctaatttgcatgcttttaaactttaaataaatgatatgatgttacctattgtatgcaactgaacatatttgttcaatcatattttgagattaatgcgtgttagtggatatagcagtaggtcacctgtgttcactaatgaatagcataccatgtgtgacatcacaatggatttattctcatgctattgggaatttaaggtgtttctaatttttttgcttcacaaatagtgctgcactgaacattcttatacaagtcttgtgcacaggtataagactttctctagaccaattcctgggtgtggtatttgtgcaccaataacttcagctttactattaatagatactaaataattgctctgctaggtgatcataacaatttaactcccaattattcacatcctcgccaacgtttaatattttcagacttttaaattttgagcctgactggtgtaaacttttctgtcattgtagatttaacttgcatttctctaattacttctcaattaagcatcttttcacatttactattcatttgcattttgtcttctgagcatttagtatactttggccaaactttctcatgggcctgtgatggttttaaaatgtgaattattttaatgcacaatgtatattagtattttggggctaacgtaggaaacaaataacctgtcaacctctggtttgtctccttaactttgatgctgttattggatgtataagatttcccacattaatgtggaaaacttacttcatctttgtttatgatttgtatcttctgtgtctaatgtgaaagttttcatatgttgtggccttgaatatttttaaagaatatttttgtatacattttaaagttttggtttttggctgggtatggtggctcatgcctgtaatcccagcactttgggaggcccaggtgggcggatcccttgagctcaggagtttaacaccagcctgggcaacatggtgaaacccgtctctacaaaaaaatatgaaaattagccaggcaagctggtgcacctgtagtcccagccacttggggatgaggtgggaggatggcttgagcccaggaggcagaggttgtagtgagccgagattgtgccactgcattacagcgtgggtgacagagccagaccttgtctcagaaaaaagaaaattagtttttaaatataggtctttaacaactggactttatctttgtgtacatgtgctgtccacgcaagatccagttttattttattttcttcacagggatcacctgttgtgtattcccatgattgaacagtcatgcctcataaggacacctttgacatatatatagtttctatgtatacctggatctattttgaaccgtctactctgttctgtttgtctatttgtctttccctgcaccaatactacgttgttatattactatagttttattataatttgcggtatctgacaaggcatttcacatcacccaccttgttgttctttaggaataacttgtcttattttctgaattacaggaaagataattctatattgagattattcttttgcagtcctttgaagacatagcgtatagcttttatctttgctactggtaagtatgctatgagtctacttgcagtatttttggaggtaatctgtttctctcttgcagctttagaaatcatttcaaatctttgtggttagtcgctatcacatccatgcgttcagctttggctttctttccgtattcactgtgattcctgtatgagaacattcgtatcggttctagaaaaatatacaccagtgtcatcaaatattgcttctcttccttttgcattttcctctaattctagaatataagttcattatatgttggactttttattcctttttcagtacctctcacttcctctctaagttcttcatcactttatctctttgtgctgcattccaggtaatttaatcatacctttcttttgcccttagttgtatattcatagttgtaccatttttgggccattttgcattcccagtggcattcaaagaatggatatttcattgatgggttttctatgtgattctttttccaatgtcactgccttttctgatggaatcctgctcttgttttatatttcaatgttcttccattaagtctttaatcatttgaaaaatagtaatttaatgatatctgtacaaaattctgtgtctgtggttcttaggtaactaatcctgatggtgactgggtgtattgcttctctcccttggaagattatattttcacaaggtttctgtgttagaatgtgagttcttgggctttgtggggctgcttcgtggcaggctggcagtgtgtctcttcaccatagttttaagcttgtctctggcatgcagtgtgtaactacttttttatgtttatttttcagcgttgtgaaaaatggactatataaatagtataaggttaaaccttttgtcgaaggaagagcagatctctgattacaaaccatcaaatgtaaggtctagtatcaggtcaataagttttcttctacctgttctgatgggtagattttttttttttctagtcaatcctttaacgaaagtcattggttttctaggactccattctacataaggattttagttctaattctccaccttacatgaggctaagacacccatctcctatgtggctgtgaaccatgaaccttgaaagcagcaatttgatttttaattaatgaaacttgttttttagagcagcagttctgggttcacagcaaaattgtgtggaaattgtggaaaattctcaacctcattcccttacttacacacaacctccccactatcaacattcccacccccatccgccagtggtacatttcttttcttttcttttttttttttttctttgagacagagtcttgctctgtcacccaggctgggatacagtggcgtgatctcggctcactgcaacctccacctcccgggttcaagcaattctctgcctcagcctcctgagtaactgggattacaggcccccatgaccacacccggctaatttttttgtatttttagtagagacgggatttcaccatcttggccaggctggtcttgaactcctgacttagtgatccacctgcctcggcctcccaaagtgctgggattacaagcgtgagccaccacgcccggcacacccccagtggtacgtttcttacaactggtcattgacacatcattgtcactcagagccagtcctctacattagggttcactcttggtgttgtacattctagggcctggacaaatgtttagtgacatggatccaacactgtaggattgtgcagtcttttcactgctttagagattttctgtgctctacctcatcacccatttcttccctctaccctgagcaaccgctgatctgtttaccctttttatagctgtgccttttccaggatgtcctatagatagaatcataaagtcgcctcttcatatcgccttctttcacttgataatcttcatttaagtttcttttgtacctttcatggcttggtcacatatatctttttttgcattgaatggcgtttccttgtctgaatggaatgtaccacagtttatttatctgttcaccctatgaggacacgctggttgcttccaaactttggcaattatgaacaaagctactataaacatctgtgtgtaggtttttgtgtggaaataaatgttcagttcaattcatcacttttagaatggcataagcatcacccttgtcattaggcattcatctaaacactcagggtggttatttttatccagtgggtaggcactggataaatatttgttgaataaatgaatagacattatttagtataattaatggtctcttctataaggtaccatgtagcagtggctgaattgatttaacgtcttgaagtcttcatcaatttctgatgacgaccagttcctagaattagaaattcacctctaagtggtaagagaatagaggaaaccagtgggttgtaactgcaaagataccacagatactgacatttgcatcacactcagcagattatatactcaaatgaggtttctcctactccctgtcattgtgtgtgataaggcaatcatgaataaaatctcacacaatgaagctgaagattgtccctgagttatatagcacctaaactttgtctagatgtcttacaaaggaaataaaaaatgaaagaggaaaagggaaggaaggagggaaggtggaagggagggaggaaggccaactgtatttctaggattggggaatttcctagtataatttccatcttagatctgccattttcatcatggccagagttagtcactctgtcatctccttgttgttcattacctcaacacttagttctagttactgatgtgtacatatataaagccagacatctgtaagtgcttagttgagaaggtgtagatggaatccaagagtatctaggaatgtaaccccaggatggttagggtaatgtctttattcagttacatttttatatgtaagggaaatgattgtctattccaattcagatttctttgtaatattaatatgtactatagaagcaatgaaaggcaaagaatccagaaagcgactagaagaataatcatttttactttccttcttatgatgctttttttttttttttttttttttggtctcttggagatggagtcttgctctgtcgcccaggctggagcgcagtggcgcgatctcggctcactgcaacctctgcctcccgggttcaagaaattttcttgcctcagcctcccaagtagctgggactactggtgcacgccatcatgtccagctaatttttttgtattttagtagagacagggtttcaccatgttgcctgggctggtctcgaactcctgagctcaggcaatccgcccgcctcagcctcccagagtgctattattacaggcgtgagccactgcacccagcctccttcttatgactcttaatgtcctataagccatttttaaaagtagcagatacctgagccctctcaattatccccagttcttactcgtaaagaactctgtgacccaaagtcattttttaaaagtaccactaatattgggatgtgcagtcaaacctgctgtattctggaccttccctgccctgtgagagctctacatgcaagacccaagtaaggctgtcagctcatgtgcagtggcataaaaactaccatgtgatactgtttcatgctgtggccaatgcatttctatcaatgatgcatcactggcttgacagcaatgttactgttgtatactaggggcaggtaaatttttctagcagaaatggtatttggaccagaagtttttatatgaagaatttgattaaagaaatattattaagtagcccttctttctaaatatactttcatgctaaaacaaaataactcagaaaatatgaaaacagaactctagaactctttgaagttagcaagtaaagcatacatacatggtgtcttagtaactgtttccattatgcagattctaagaatctttcctggacaagactaaagaattcccagtggcaaaccatgatctgctgctcagctcaaattgtgggtcccagagcagccatatgtgatagttacttgtaattaaggacttcatctaaacttgaagataagctttccttgctgaaattagatattacttcctatttaacttatttagataaattatttttattttataaatagaatacatactttaatagtttagtagaatatctcttaattttgtagctccttcagtcaatacctttgcattcctattttatattgcattatattaatagttactggtcaacattatgtaatgatgttcctgagtcctttagtgtctttgccttacttacttgattctccttgtttgcagtagactgttgctgttttcctgtaatgcgttgttcttctcctgtttatttatactatctagcaaggccatggaggaatttggtagacatttgttaatgagtagctagccatcctgagttaatagacaatgatatgaattgatggactcattgagaaggtgccatattgtatcatttctgattacaaataaaccaaaaaattgaactaagagtacataataggttaacatttcatgtagctaaattaagagaggccaaaatatcaaagggaaagttgaaagtcacaaggaaccaccctgggtcttagctccatcaactgtgtctcatgggatggcaggtaaattagttattgttcttaacagcctagattctttacttgagaagacagggataataaaaatcaggataacatctgatcttcagggcgctgtgagggtaataatgttaggcaagtatccagagagtgcctggcacaaaacagccacgcaggtgctgcctgttgcttccttcctgatggagggttattgataaacatcgtgcataataagatttccaagtaagcctgtttcctctcaattattaatgattacctggagttctgttaaggagaatcagagatctctggacatgagtttgggtcataagaaagcggtggtgagctgtggctggcaagcctgtgctcacagggaggatgtgtgagttcaatgctagcttctcttggggcagacgtaaggcatttgagctcagtctttctttgagctcgactgtatcgcttgatttaggtttgctgttctggtttttaaaatttagtaatagagaagagagtacataagtagaagaccaaaactgtattgttaccagagttccaaccgctgctgacttttctggctctacaaaagaggtaagccgttaaaactgtaagtgtccccatctttttcctgcttatctcttagtgagtaataattttgcttcttacactttttatgtctctgagctacagagtcatagctacaagtccttcattcatccctgaattttaatttaatgtagtatttatgggtgttagcttttaaaaataataccatattactcctcagaacatttgccatgggctgtctgtatccgaatctcctagaaaggagatgggaaggttgttataaatgcagttttaagagttccactgggcaggggctcccctgaaatctccctgactctgctggctggatgcaggcaatctgcactgttagcagctctccagggcactgttatgcatgctcagatgtgaaaccctcggatctagattttccaacttgcactcattccaagatggcagcaggacaaccttttaactaatagaagacaaaggattcaatgtgattaaatttgtgcctaaaattttgatctcaggctatggtattttaaacataatgctttacaccaggagtcccccctccccgccattgtgaaatgtacatgtgaagaatctaggttgcacgctccttatgagaatctaatgcctgatgatctgtcactgttgcccatcactcccaatgagaccatctagttgcaggaaaacaagctcacagctcccactgactctacattatggtgagctgtataattattccattatatattacaaagtacaaataatagaaataaggtgcacaataaatgtaatgcgcttgaatcatcctgaaaccatctccctgctccagtctgtggagaaactgtctcccacgaaaccagtccctgatgccaaaaaggttgggggctgctgctttccactgtaattttctaaaattttcccaaatcaggagggaggatagtaagtaatcatttcatgttgtgcaaaatattccctggtccagcaactttctaaaatggttctctctctctctttctctttctctgtccctgtccctgtccctgtccctgtctctggctctgtctctatctctgtgtctgtctctctctctctgtcattataggtcatggatgtttatatgagaatatttcaaataccaaaaagcatttttcaaaaagtaaaatccccctaacctcacctcccatagatgctccatcatatatttcacttgggagcgttgtgggcactgtggagttccagggctaggactgggctgcagaaccaacttcctgggttccagcttgttgaccctgcacctgctggctcaaccttagtgtgcctcagtttcttcatctgagcaatgagaatagtaaatgtcttattcttgtacatttatttatttatacacctcatagtgtttttgtgaggactgaccacatgcatgtaaacgtcttcttaagctcagttgattttagctattattattaatcacacatcttataataaagttgaacactttgcaatataatcaaaacaaaactattttcatctctcaccagccttttgttgaggaagagcaatttttccctgtccctggatgggaaatcagaaggtcccctgacatttttattcactctttaacaaacttccttacaggtactagaagtcacagacatagtcttaaggatgtaattagaacatccaagccaagacaataatacgaacgtcgaagttaatttgatgttggatcttcttaccaacacccctcccacccctgccgcccctgcttgcacctgcttttcctggagcctaaggaaggaatgggctttgtctctggttctttgccttgcctacctgtatgttcccttgtgcctgcttcccagtttgtgacacctccagggttggggggtgggactgggtacagggtgggtccttgtcctggtgccccacaccctcgcagatgattctagctggcttctccctcccctcctcctgagaaggggcttttgggggctgcagtggtctgctgacaggagccctccctgcagctcccctggtgcaggcaggagtgccctgggtgtgcttggattccttcatgagtgtgcaggaaccgtgcacaccatcagccactgggtccatctgccctcctaatgggtgttttccacaggttccagccatcccccccctcaacacacacgcatacacacacacacacacacacacacacacacacacactgtctgtccctctctcttcatcactttttcgtggagcctacatctgaagctccaggaacactccaattcttgttctgcaatctctttgagtgctggcctcaactttgttgatatgcagtccacatgctatgcacttcacccatttaagcataccattctatggtttttagtatcttgggagcgttttcactccaccaccacaatcaatttcagaacactttcatcaaccccaaaagaaaacctcatactcagtagcagtcattcccttttctcagttcctggcaaccattaatttactttctgtggatttgtctattgtggacatttcatataaatggaattacacaatatatatctttttgtgattgccttctttcacttagtacaatgttttcaagtttcatctatgtcatagcatgaatctgcacttcatttttattgccaaataatattccattgtatgtatgtaccatattttatttatccactaatgagttgatggacatttgggttgtttctacttgttgagtatcgtgaatgatgctaccatgaatatttgtgtgcaggcttttgtataggcctatgtttttactgctcttgggcgtatacctagagtagaattgccgggtcatgtggtaaaatgtttagctatttacagaaccctcaggctgttttccaaatgcttgtctatatttattgtgcttcatatcagtaatcaagagttcatggagtattgaaaagtctactatgaaggtgaagaggtggaagaaatgtgatgatcacgttcacacttaggtcttggaaaacctgccacgtggacactaactcttgatttctcaacagaagacccgtaaacacgttcatgaactgagctagaaaccgaaagccataaacgttaacggacattatctgggagaagtgttgttacacagtcgggcacagggaggttccctgctatgttccatttgagagcgctttaatttcaaagggtaccatctggccctcagtgcttgaactacttgtggctttaaatgcagggttttgctcattaaagcaggtcactcatattttgaatcagaaaatgacatttaagttactccttttctactttacatatgtctcccttcagcttctggtcatctctcactcttcctcagtcttctgcccccacagctgccagcatgtgatggtgtgagtggcctggcatgttttgcaggatgcagatcccctcaggggatgcccggctgccgggggcaggaaaggcagcgacccctagctcacagtcaacgcgtggcatcaagagtgctataaatggaaaaatacagagatggccctgtcctggctttgatttagaatttggcatgtttccttttgcacttttgaaaaaaagtcacgactttttactaggatgggtaggtagtttgtatcacaactatggccacatttgccatcattatgaaaataaaaaataaaaactccttggagtttcagtaatattgtttgcatctcttaccctgtgttgtttgattgtcttcacagcccgcatctgtttaattcaaattatgcacatgtctctctggactctaatttcctccagctgttaggatgctggagcagaagagctatagatttaaaacagctgtttagttaggagaactgctttgtgtttagtttaagactgaaccatatatttcaaacacattcttatccatttttaaataaaaaatttctttaattgattattaagttgattcattttagtatattttctgtgtacagaatttaaggatgtacatctttactcaaattttcattttagaaatagaaaaatgagataaaatgctttgtagaaatgtaaaatattgtctgtccccaatcacgtgtcagtaagtaggtaagttattaagaaaaagagcagaaagaaaataatttgagaatatagtaaatatactttttatttaactacaggaatagtctagaaaccaaaaatggtggagaaaactgattgatgatgttctgcccacaaactacacacagaaaaattcttacagcctggcagcaggtttaattgaatttatcaaaatgcttccaaataaaatatacttactcagcaacttgtaaggaatatgaaaaggagaaggaaggaaatctagtgactttgcttccatcctacctccagaaacatagttttcttcttggcacagaccgaatagacttgatcagaataattaaccatccttaccacctcttagcaaaggacagacttcttgacagctaaagctgctctgctacgattatcttgaatgtcaccaggtagaggtggggtctgggggattcaaatggtgggaaaatatggaaagcacttaaatgaggatttaaaaaatatattatttaggaaaataggacagaatgtgcaaacaaatactcaccctcgacaattttgtcattgttatggcagtggtataaatggaaaccaagggccattagcacaaatgtccacaagtgccaggccggtattttaaagcatgatactggaggtcaaatattggaaagtagtggagccactgagaactggagatggcatgcctgatttaaagacatcacaatttttaaatgattaaaattcagtgcactaaacaacagaattcagcgttttgcagtctttcaaatggagagatgcctattaacgagtgttgctgagtattacctatgaagatctcccattagtcagaatagtctgaataatatattctaaaaatacatttctttatttaaatttgaggttgtcttaactttttttgagacagtctcactctgtcaccaggctggagtgcagtggcgcaatttgggctcactgcatcctctgcctcccgggttcaagcgattcccttgcctcagcctcccaagtagctgggactacagatgggtgtcaccaggtccagctaatttttgtatttttagtacagacgggtttcatcatgttggccaggatggtcatgatctgttgaccttgtgacctacccgcttcaccctcccaaagtgctgggattacaggtgtgagccatgagcctggccttcttaacttcttaattacctcttaatcacatatcactaagtgttgaacagctactcttaaagtaggaagctttcaccataaagatatttagatacatgagtgatactcttcacacgatctgtttctaccttttgaagatttggcaatttcagctgcctttattgaattcattatctgccctgtgatacttgattgcctccacacaattgctgcatttcggtgccacattgtgtcttctgtttgaacacatttaaacaaagtggtgtgacactcgtgttaaaatttaaatagtttctagtgttaccagtccaaataactttccccagttggctatttttgcgtaggcacaaccaattgtagctacgctaagtctattacgcagggttgccggcaaggtgaacctggaattgatggttctgccgcatcttcgatttcagaaacattcagaagtgaaggaagtagaatcctattgtttttgaagaggtgttgtttactagcattttgccatctctcagaaatcagtgaaaattttaactgttccttagcatcagatatcttaattttcttaaataaaagaacagaaattttactggtctgtaaaatcataagtttgggaacaagttataaaaatatacagtgcctccagtgatagaaaatccgttcctttgtaaggcagcctaattaatagatggacatcaatgataatcagttttaagaatgctcactatatatatgtcatctttacactttccattctgattattttattctatccatagatagcattattttaaaacttcaaagattcactttttttttttttttttgagacggagtcttgctcagttgaccaggctggagtgcagtggtgcgatcttggttcactgcaacctccgcctcctgggcttatgccattctcctgcttcagcctcccgagtagctgggactacaggcaccaccaaccatgcgcggctaattttttttttgtattttagtagagataggggtttcaccatgttagccaggatggtcttgatctcctgacctcgtgatccagccgccttggcctcccaaagtgctgggattacaggtgtgagccaccacgcccggcagattcactactttctaatcttcatggtcatcataacacctgtagacaatgatgccttgtcctaacagccgttcaaacctgcttgtccttacctaacacagagattagcttaagataaaagcaagagtaatctggaatcagtcatcacccttttaaagttttgtttgtattatggagcagtaagttctgtgcatttcctaaagccaacagctctgtatctgaaatcttttttgttgttattgttgagacagagtctcaccctgtggcccaggctggagtgcagtggcatgatttcagctcactgcagtctccacctcccaggttcgggcaattctcctgcttcagcctcccgagtagctggcattataggtgcctgccactacacctggctgattttttgtatttttagtagagacaggatttccccatgttggccaggctggtcttgaattcttgacctcaagtgatccacctgcctcagcctcccaaagtgctgggactacaggcgtgagccaccgcgcccagcctgtatctgcaatcttgagtttgacattgcccttagggcccagcatagcagcctgcctgtgtctgtgctttctccctaacccccagcttgaagctccaagtgccgattctggactagatgaaactattaaaataggtgatgtctatggtctactccttaaggcaaaaaacatgaaagaataacatgactggaaatgttgaaacttttaatttaattcctaaattgaataaaatccagtgaaaatagcggcaatgttagaagacaatagaatggtgatttgcacaatagttttttgaatgaaatggaaaaaaaggaaatgagtagagatccaaaagtgaaaatacagataatgtttggccctaaaccaacttttgttgccttttgttcttgtttcattttgtcagtaataccttgctatctaattagttactatctgaggcagcttattaacttttttctattttcttcctttctatatttcacaaatgtttcaagaatctcatttgtctctttccccctgcatagctacacaacgcaaatatgtagaccgctccctcataactcatgcttgtagctccataaatcatttactcttgcaagctgtgtgtcgtggtctgaagctgatggggcttcttcatttgttctgactccaggatattaaggactgagaaaaacaacaataaaaaaaacagactgtacagagagtttttagtcttttaaagccaattatataggcatgaaatgttgaaatatttgatatgggcttcagaccagactggtcttacctattactgcacagaagaagcccccaattttcatatttaagaaatttttgcttaagaaatgaaacattccagaaattattttcatgttttcatggtatcaggtttatcacacaaacatatcacaatacattgccagagataaattcattaaactgtgtttaagagaccactagtctcttattgttttgaaagtttaaaaaaatgttttaatgcaaaacaagttggctctttttttcagtcctgtaatgtcggcacctttgtatatcccatctatacaaaagtaatccaaatatggatacttgtatttcttatacaaaacataatttacccagttataagcttacagttctcaagctcaatttttttcttgttggtgataaacaaaagataagcagtaaaatttaacttgcagttgagctttgaagaagagctctctgtcaagtatcaggttttagaaagcacagttgtatttaatgtgtcattgtacatatttgtagtgttgggaagggaaattcttttaatttaaaacattcaaaaccaagaagatggaactttttcttatgattgctggaattccatggaaaataggataatataagttagttaagtagcccttaccccgtgttgttcttctgcttgtttgaatgtatactggattgctatgaagaacagattttcatcgcatagggaggcggtggcttaggtgtccacagtgagtcccgtagtccccacttcctgtgggtgacatctttgttccatttgttattcatcgtaccctagaatcctcagtccagacaccttctagattgagccttgctctagatatgccatcctcacggtaggatatgacacaaactcagcaatttgctttgtgcagttcaactccagaaatttactttgagccccttggcatgtcatttatcgttccaatattatggcagtaatgtgaacaactgtaaatcatttgtagcagtgctatggtgttacttttagtaggttcatcttactattctgtttttaagtaaattaagatctcattttgcaaacaacctgctttctgtgattgttgttttccagatcagaaaaaaaaaaatgcctctcagctgtgaccaaagaaatactatggttttctttatgggaaatttctttctcaatagttggacattgtgtttaaagcaaagggagttccaggatctaaagaagtatcagggttgatagattcaaatttctaatataggaaacattttttagtgtttttaaagtaatttaaatgtggtggggtgaggtggggatgtgagcctgaggaggttagaggaaaaagacggtggcccttgaaaggtactcagtttgcttcaatggttatatttgtctccagtctcctaataattatagttaataaaagtgataagggatttttaaaaattataactatattcaaagaaaaacctgatccttaattgtaattttttctggattgtgtatttttcattgccaaatttatacaacttttcttacaggtggtatttaaatgacagtgatatttaaaatggattattaaataataatattatgtttttgcttctgtaatttatcacacacattgcacagttgacaagtgtcatctccaacagtattacagtcctccttgggggagaggagaaaacctaacatctgttacatgatgttaagcttcatttaacattccttgtttcttatactgtgctgtctaagtggtccatcttttgtctagaaagtaaatttgttagtgattcatggtcattccggtataagagctacacatgtatctcaaggtttactgttatcagaagataccttattttcctaattaacctagtcacttcttgtaaagtaggattcaaatgcttgtcttgaaatccatttttaaatgcctgacagatattttttgagttgccatttaatttttatcttttaaaacatccctgcaacgtaacctttttaaaagtaaattccaccatatttctctttaaatagattattgtaatttaaaataacatgtcgctgtaggtagatcactgtgaaaccccaaaggactatatgaatatgttcatttctctccttttcatttttgtatgagtctgtatcaataccccaagatttaaggagagacaccagaagaatcattttcaactttgctccattcaacaatgaaataagctaaagtatcatttcctttccctgtcacctccttcttccctgtcacagtcctcatcctcatgagccttaaattctgctgatttgggcagaggagaggcttccttgaatctgaacgcttttcagctcctcaggtgataacagaagccaaactccaagatagtggagcagatcactaaggaaaagcctcctggatgagagttggcaagaatgtgttttgaagtggaatcacaaaaggggcatggtttgagaagcagcctgtaaatgacagggaaaaattatcttcactttcaatcacctctgctctcctttcctcattggtatgcattgtccactcctctgaggcaggcttcctgacagtagaaaagaaaaacaaaaggaggcttttcagcaagggggacagacacagcccttgctttcagtcgagcgaaattggaaagggcattctcccccttcttccccaagggaggcaggaggagacccggctagatggagggtgtggactttccatgtgaatcgttagctgtttttcagtggcacattttttggatatgcttttaggtctgtttctggattcagctttgaaaactatccaatgggggcaaactctggtcagggtggggaactgaggatctcttccccccatgggggcaaagaatacttcctgggggccagagcagtcctcaaaccaattgatctccagctggaaaaaaaaaaagattttattctttgcaagtctctcagcaggagcagaaaaaacagcagggtggttttcattcacaggaaccaggcattcacagatctctacagagaaatgttagagaaggcctctaaaaacaaaaatgcctagattgtgcagctgatctattattttattttcattgataatgttattttgttagccatgctgagtcgatgaaagctgctgtattgaaaacttttttcactggtggaaataaaatcagcttatcttatttcttcccttttaaacagcatggttgcacatatcccgtgaaaagaaaatgtcacactgattccgctgctcccatgtgactgaactacttggtaaaaaagttggttttacttgctgtgggattgattttaaattcgtctttgaattatcttctctgagagctgtttctagttagtgtgttgagaatcccacttgaggtattaatttcatcctacatgatgtagtttaaacaaaccaaatattttgtgcttgggcttgaaagaggtaaatattaaatttataactagtaatacaactttaaattatatgcttgataaaatactgaatacgttagtgttattaaaaggatatgttcaatctcatgattctatttgctaatattctatcatgtttgatctacaaaattggcaatttcatgtggttcaacccatattgataatcatgcaaaagtgcatggggtgagggtggggtgtgctacagaaaagggagaggggtctgggcgtggtggtgcacacctgtaatgccagcatttggggaggccaaggctggatgatcactttaagccagaagcttgagaccagcctgggcaacatagtgagaccccctctcaaaaaaaaatatggcaggcatggtagagcacacctgtagttccaactactcaggaggttgaggcaggaggatcgcagaagcccaggagtttgaggctgtcatgagttatgattgtgccactgcactccagcctgggcaatagagtgagacactgtctataaaaaaaaaatacaaaagaaaagaaaagggagggagttactattcccagaagaaaggaagaatggaaggtacaccacaaaagcagatgcacattaccccatctatgcaaatcgttcctttatttgtgaaagaaacccagggagcctgtgtgtggttggagacaacagtgtcagagagacagggggagtgggagaggcagggatggaagacaaggagcggggaggggaggagaaggcagagggaaagctgggaggggaggggaaagtgaggtgaagaagaggggaaggaagaggcagaggattcattataatcatttacgaagaatgaagaatgagaatcaactagaataaaaatgagagatgcttagagtaagaatatgtgattgtgtccatggtgaagatgagacatgagcttcaggagcttccagattgtttagatgatgctaaaatgtaaatagtaatctatgggatctttaccaaaaaagaaactttccacccctaagcatgtttgccaaagtgcctaggactttatagtcaactctgtatgtgtaaattgcttccacaagaacttatttctcactatctctttagtgtaagttagtggtacgtttgcaaattatggatagaatatagtggtttaaaggccttgaatgacctagcaatttgaaaacaacctattctgctttagagatgtaccctaaacctggctttcaagaatacataccacttgtaataattcctctcaaaatcatattgagggcattttgtgagtgcttctttgaattaacctgtattttcaaaatgttcttggtacaactttgacagacattcttctggaagtcttattttcacctaagcagtcacttaagcttttgttttgttttttttttctgaatatagttgggaaattttagaggagacttgcatattacctttttctgataattgctgcaactttatgtaagtaccccgactagtagcagatatgtttctaatgggatattatatttattttcataagatccatgtgactactaatgagggaatcagcaggatgacaaaactggttcaaaagaagatatgagagtaggaattttatatagtcagatgaaaaagaaatgctgaaataaaattgaaaagatgtagatatcatagtggctaatttattatcctactggataataaaactttttaacttgataaaaatattagtcatctgattttatcactttttttttttaaattaggaacccaaactttaaaatgtgtaaaatacctgggcccaaatgaatagaaaatgtagtaagtttaaccaagttacatttctctagagagttcaaggagatttagtgagctttgctctagcaagacattaacacatcagtcgtttttttccttatttcacattttgagtaatttttcttaataataatgccatctatttggggaagtaaaattgtgaaagtattttataccctgtaactgtgtcagtcattagcccttcattcacattttaattatgactagcaggtgataagaattgagatctgattctttgttatgtaataattttaagacaattacatggaagacagttgtgattgactgtcttaagcattgaagttgacgcatgaaatcagatggtgagtttggggcctactggttgtttgattttaatgggtagtgatcttcagttgacacatctgctacaatgaacttgacatttgcaatgataacatatcagcacacttaattactatattacatttgttttcacgatgtgggaggccaaccaaagctactgttttatgaataaagcctctttgtacaacgttatgaaaggctaaactgaaaataacttggagtacatcaggagcaacagaggtctgctggtgaacagtttccctggacaatgttaccccctggcattatttagctgaagcttcagttacctcttaacagctctacttcaatcaggtcaacatctagcacctttgtattagataaaagtattttaagtgagtgagggcaagagcagtgagggaatagagtagtcccaaagtctaggttgctttggaagtgggcaagggaaagtctgcctgggaatataaatgggggtatttccaaccctcgtttagatcacatgatctagtaactgtccgcacaaaattatcaaagcttagagtatcctggaaaatctacaattttggtcaacattattatggctcttaaacctggcagaaagttggaatcattattaaactttcaagaatagcttcctagagccataccagatctactaaataaaaatactggggtggggagggaggcaggagagtgaggatgttatctgtattctgaaaagcttcccatcaggaagtggtggcagccatgcacccgtgtggaagaggggaggagaagctggcgggtggtgtagacactgactttgctacctacctcaacttttcatggtggatagtgcgctcctatctcttctcttcaaggagggttcccagggccttggtaatgattagactcttgacctcagtctgtgtttattcactggagtgactctcacaccacatggtatagtcacagtgctggtaaagacacaacgaggtcaataattaagaaattgtgtttcatagaatatttgctacacagatacattgaaacagagaggtcaaatgtagctaggaaatgctgcatagagagtctatatctaagtactgcattctttataatatttgatgaagatgttgaatggtgtgtttttctggaataaagttcacattgaactcttgactagagaaggtaagagtactgttcatgcagtatgcacagtggttctaaggattctagagttggactctttggacttgaactctagttccaactcttgcagccatctgacttcagcaaaggtcaaaatttacctctctgttttagtgtccacatctgtccatttggaataacaatggcaacgatcttacatggttgcagtgaaggttgagtaagtgaatgcatgaaaagtgttgagtttggtgcctggcacataaaaagcccttgctaaatggtagctgtcattaatcaaagtgaattggataaaaatcatacctagggaaaaatgatgctccttgtgtaaagctggttctaaatccctgtcttgatgttcagcccagcaggagggtccattccattgcttgcttgttgttgccatctttttatttgttgctttgtagttgtatatttacattcaggtgagttagtttgctagggccgccataccacagactgcgtggtttatatgttctcccaggtctggagtctagaactctgagatcactcggggtttactctgagtgcacagtgccagcaggtggtttttcctgaggcctgtctccttggcttgcggatggcacattctcactacacccccgcgtagcgtttcttctgggctcctgcaacgccagtatctctcctgtcctaatcttgccttcctataaggacaccattcagattagattcgggtccaccctaatgggttcattttaacttgatcacctctttaaaggccgtgtcccccaaaacattctgaggtatctgagtttagagctttagcatgtaaatgttgggggtgacacggttcacttcatagcacctggcatctgcattcccatcaccacacaccgtggactagatgatgagttccttggaggcagaatgtatcttattcttctctcgaagtcttgtccataagagaccctcaaaggagtatttactgtgcattgaattcatacagatgtccaagcatgtgtgagggcgacttagagaaacccctgcaggtgattttgatgcttggtctctgtgactggacataggcatgttttcgggaagttgtttctcttttgtaagatctgccattacagaaatagtctattccatgttctcactagagatttaggatgtttagaaaaataatactgaaagtctgcgttggaagacgtccaagtgtcagaacaggctgcctcactccttttttgagttgtctcttaaaggcttcaggagctctgcaggacacatggaggggctgacctctgagcggggcatattgtgaaacattcatggtgttttgtttttatgacatttttgctcatccaatcccaagcaaacacttcttgcattaataatataggcctagtgcttggtttcatttctattttgtgtatatagagatctatgaaggaaggcaagcgttggattctatgctgctaaaagtatttccttacttggtgtgtggctctatgttcactttttaaaaaatcagaagtggccggtcgcagtagctcacgcctgtaatcccagcactttgggaggccgaggcgggcagatcacctgaggtcaggagttcgagaccagcctgcccaacatggcaaaaccccgtctctactcaaaatacaaaattagctgggtgtggtggtgcacgcctgtagtccgagctactcgggaggctgaggtaggagaatcgcttgaacctgggaggtggaggttgcagtgagccaagattgtaccactgcactctagcctgggcaacaagagtgaaacaaacaaaccaaaaacccataagtgttggtttcaagcctttgccaaatttcaaaatatgagtgtactatttggaatcctaaaggacatgctcacaggtatttggcaaatttctagacccaatatccttttggaggaagcactgagctctttgctaatgaggaaaagaaaaaaggattttctttctttctttctttctttttttttttttctgacagagtctcactctgtcgcccaggctggagtgcaatcgtgcgatctcggctcactgcaacctccacctcctgtgtttaaatgattctcctgcctcagcctcctgagtagctgggattacaggcacatgccaccacatcggctaatttttgtatttttagtagagatgggggtttcaccaggttggtcaggctggtctcgaactcctgacctcgtgatccgcctgcctcagcctcccaaagtgctgggattacaggcatgagccactgcacccggccaaaaaggattatttctaaactgacagatgaagcagcaaattgccaaccaacctctattttatgtattaggatagggaagacctactgggataccaggcaaaatcatgaagtgaatggttcggtttaatgccatgaaaaaaacaggtaagccttcaccaccaggactttatggatagaggagaaagagaagtaaaaacttgcatagctttttaatgatgataagtgagccacctggacccatttccctgaaacgttcttctgacattggccttcctcccacaaaactccatgatttccccgcccatgtaattacaacgacttgtgtcactccccactccaatcccatccaaactttgaggctgctttggaacttgatccagttctgtcctcagatggaacacttttttccccattcctgaatccaggaatacggtgatgattccagggattcagtaactatttctgacacctgtgtcaggctgtgttttaggtgtgggggttacagcttcacacaatggaaaggaatcaccggtgccctcttggagcctccttttaaagagaaaaggctgacgacagacaagataaatccatcagatatgcacagtggtatttcagatggtgatatatgctgtagataaaaataaaactcgctggggataggaagcagagagtgcagttctaaataaggcggagtggtcgacctctttgacaagaaggcatttgagtaaagacgcagcccgggtgagggagtgaggcacagggctgcatggggaagaatgagattaaaggagcagcaagcccaaagctccaagggggcaagcattcgctggcaggagaggctggaggccagagtgagtgaggagagctggaggcgagctacaagtgacgaaaggcgccagatggtgttgggccttgtgagttgaaagaatttcacgttcatggacatgctgtaaaccaatgttgagaagaagttggccagttatgttgagaacaaagcaaggcggaaaagatataaatctgggagtgagaatccagacggtgtttaaagccttgagactagatgagatcttcatgggtatctgagtccagaccatcccaacactggccagatatccctatacccttaacagaaatatatgcatgacagggccaggcagagtggctcatgcctgtaaccccagcactttgggagcccgagacttgagcctaggagtgtgaaaccagcccgggcaatacagcaggaccttgtctctaagaaagctaaaaaacaatcactcagatatgatggcattctagctactaaggaggctgaggcaggaagatcacttgaggccaagagtttgaggcttcaggcttcggtgagctgtgatcacaccactgtactccagcttgtgcaacagagaaagaccttgtcttaaaaaaaaaaaaaggaaataaaagaaatatatatatatatgacaaggaaagacacaaacccctactatttatgatttattgtatagtgctttagttaaaggaggctgagtggacacacatattttaacttttccttttttgggggtcagcctaaagtcttataccccgagacaatgaattaagctaagagccctcaagagtgagacttctgcatttgttttaccgtgagggagtaggggggcaactgtgagtgggaagtggaaagtgtgggaacggccttgtgttccgatagattccttttggagaaaagtacatatggctattaatttccttaactctccatgcctgagcatggttggcaaacgctggaataatactgcttatcggaatgacactatggtttgaaactttttttttttttttttgagacagagtctcactctgtcacccaggctggagtgcagtggtgcaatctcagctcactgcaacctctgctttctgggttcaagcgattctagtgccttagcctctcgagtagctggaattacaggtgtgtgccaccacacctgggtaatttttgttttttggtagagactgggttttgccatgtcggccaggctggtcttgaattcctggccttaggtgatcctcctgccttggcctctcaaagtgctgggattactgggatgagccacttcacccggcaacactgtggtttgaaatactcagaataatctctagaagttgcttaaagctggttaaaaagttatcgagtccaaaataactgtttgcttctgtggaaattggtctgatgagatttcctgtcttgactcaattttgataaattctattttcttataaagttgttcatttacttcaagttaataaatttacaaagaattgtgcaaagttctttccctcatatttaccattctccttattttaattttgtatattttctttctctttccttatattagtttgaagtttattgcttaaagatgatgctcaacttatgatggtttgacatgattttttgagttttcaatagtggaaaagtgataggcattcagtaggaaccgtaattgaactacccacacagccattctgcttttcactttcagtattcaataaattacatgagatatttaacactttattataaaaataggctttttcttagatgattttgcccagctgtaggctaatgtaagtgttctgaacacatttaaagtaggctacagtaagctatgatatgccatagttaaatgtattaaatgcattttcagattatggtattttcaacttacaatgaatttatggtgatataaacctattgtaagtcaaggagtatctgcataggtttttttttttcccagtgaagaactagctttttagtttatttgatgtttctgctctttttgcccattttctgattcagcaatttctatttttttcttaatattctttttttctgacttttatggttatgttgtttatatatatttaatcgtagttctgtctccatttgccacattttggcatgaaaacatactttttattccttgtttttaaaaacacttgcttttgcaactatgaatttttctctgagcatcagttcagatgcacagcgtgggttgccttgtgttgcgtttccattatcatcaatgtttttactatattctgtgattctcatttggatttcctattttattcaagaattgcttaaaataattattttaaattaataacacgttatttttgctttattaatttctaagtgtatattacattgtactcagagtatgatgtatatagtagttccctcattcaaattaattcatattttattggggcctgatatgcagtctcttcaaggaaatgactgttccataagcatttgagaaaagatgtatcctctgttttaagaaatgtacttcctctgcttcccacccatctaccttttctggttcacctcccattttaaagaaatgctgttgttttacagtcaggacaaagtgcactaaactgttttccattaccctaaaatccacaatgatttcagtcttagttctattattaagctaatgatagttcggttttttccaaaaaattttgagaacaatattcaacatgctgtattacttttcttggaacactctttccttgtgttttttactggtgtcattttagcttttttttttttttttttttttgatatttacatgttgctgtgggaaagtcagaggcaagtctgatttatttctccacataagtgaattgatctttctgcttggctgtccagaagattcttttgctccacaaaccacaaactgatcattttaataagttataatctggtgttgtctacaggtcattttccttttattacaaagtgttatttccatatgtagattcaaatcttctttgttttttttttttgttgttgtttgtttgtttttttcttgagacagagtcttgctctgtcacccaggctggagtgcagtggcacaatctcaggtcactgcaacttccacctcccaggttcaagcaattctcctgcctcagcctcccaagtagctgggattacaggcacctgccaccatgcccagctaatttttgtattttcagtacagatggggtttcaccatggtggaccaggctggtctcaaactcctcacctaaggtgatccgcccactttggcctcccaaagtgccgcaattacaagcgtgagccactgtgcccagcctcttctttgatttcttttttttccaaatcatacaggccgtttagctcattgttcttttttctatctttttccttgtagtgctttttgcagtgagtttgtacctttgtgtcacttcacatcttatttttatttttttttcagttgttccttaagtttctctgttatgtctccagctcttgtatttctgctctgttgtcttgtttcatggacacaactgcttggttgattcattgtttggttttcatttcttactagaataggttgccagagagttctgttgagtaacaacatttttctgatgagatttcttagtctataaatagactttttcttgtagtatgtttgtatagattgtgtgcatgcatgcatacatgcatgtgtgtgtgtgtatgtgttattcaacattgaatacttgggtttcatggacatgtattgtggaggggtgtcctgtatgtggtggggcgtagagcagtagtccacctgctattctagtattgctcactttcttactctctgcctcatggatacagactgcttcttccaaccgtggccttgctgtgtgattattaattttcacctgcctcctctgttactctaaaccaaatttggtctagtggagctatccacccattggtttaccccattctgattttgacccctcagtgttcccctcactttcaggaagatgtctctccatgacaatatctctggcttccttccacagttcctacccaattgctgttgcttatgtggctttcacattcattttagagtttcaccaacaagatgaaaaaaaatggggaggggattgttccttggtgagagaaaatgctgtttttccgtcccctcttgttgatggaagtttccctaggagaatttttattgtcccatttttcatagtcccatttttcataatacttcctgataatcatgtttatgttttaagtcatgtgaagaaggtattttgctgaagtaaaaatttacatcttcagtttctttttcttgagtctgtatggtaaattactggatcaatattaaagattgcccattagaaaatagccctcttaaatagaatatctggagaaattagtgaaaattagttgtggcaagcaggaatgtatcatttgccacatcatgtaatatacacacagattactgtagagaaaaggagatttgcatatttgtttccctgaaaataaagtgaagatcctgatgaagttaaaagatctggctggcccaggtggagtgcctcacgcctgtaatcccagcactttgggaggctgaggcgggtggatcacctgaggtcaggaattcaaaaccagcctggccaactggtgaaacccagtctttactaaaaatacaaaaattagctgggtgtggtgctgggtgcctgtaatcccagctacttgggaggctgaggcaggagaatcgcttgcacccaggaggcagaggtttcagtgagccgagattgtgccattgcactccagcctgggtgataagagcaaaactctgtctcaaaaaaaaaaaacaaaaagagaaagatctggctgaagttgtcttactctttataacagcaaatttgtgttgatattcatttttttaagaaaaacattataactacctatgataataactgtggaaaaatgaagttgatgttataaagctttattcagtaagccagatgttagttaggaaatgatactagaagccttttatatgtttttcatgtttgtattacatagcactctgggatttttaattttaaagtatttgctttatgttgcaagtgttaaatagaacttttatagtaaattgattcatagtgaatttttgtttagtttcttttccacaaatttgagaaaatctttcttttttttttttttttttgagtcagaatcctgctctgtcacccagggtggagtgcagtggtgagatcccagctcactgcaacgtccaggtactaggctcaagtggttctcaggcctcagcctcccaagtagcttggcttacaggtgggagtcaccatgcccagataatttttgtatttttactagagatggggtttcactacattggccaggctgttcttgaactcctgacctcaagtgatccacccaccttggcctcccaaagtgctaggattacaggcatgagccactgtgaccggccaaaatcttacatttctactgccgagtgtgctcttctgcctcaataaaaatgggtaaggagttccctaacactcaatgtcagcggtgacagtgcaggaaataagtagcttttctagacctccttaacgctgctggaagagctcatggattggagcgtttagcttttcatttattatagttgtccctgtaaacaaattttaaatttctgaagcaaggaccatgttatatttgcttgtcttcggcttctgcatttccatctacctccaaatatctagtacagccgtgtgcatatagaagatgtattagctaggactctttcaattacaagaagcagaaatccagccagactggcgtaagaaaaaaagagagattgttggattaaatatttgagttcctggcattaatgttggcctagacatgacttaatccaggtgctcgaagttaattcagacatctcaaatctgttgatattcccgagtttgcttctttttcttaccttcctgaacagttgctaaatgaagagagttcacagaatcatttaacaataattaagcaaattttctggaatttacttcattaagtcagctgtgtcctcttggtgacagaaaggcaccataagcttcaggcttacattctatcagttagcaagcctagtgggaagagaaggcctctttcttaatagttccagcaaaagtcataggagtgacccttattgcgctgtcctcggttgcatactatctccaacaccactatggccatgggaactaaacaggtggataggcccaccctagtcaaaccctatgcctgtgtgtatattgtgtgtgtgtgttcatgcctgtgtgtttaggggataagttagcccaccttgaacctaaatgcatcagacttgtggtttctcagaagtcagtgaagttgttcttaccaaaaaaggagaagaattctgggcaggtaaaaacacagtaaatatgattgcttcttttgtataaatgtgtgtgtgtgtgcatgtgcatatgggagggtgattaatttatatcgatcttacactggcctttatcagcacagaaaattatgtttctgtaacaaatgtgccaatagttccagtggctttacacaacaacaaaaaatgttttctaacacaagcgacgggtccagagtgggtctgctcgatgtgggacctcgggctccaggctgactgagtgacaacagtgaacgcgacagacaaggtccttgtcacgaggctccaccatgacaagttgccacagtcacaaaggcagggaagagttggcgtcttatgctctggctgggaagtgatacccatcgttccaccttgttagccagaactagtgacacgtcccacctaaaaacaaagggactagctggctcgatattctatgtggtggggcagcaaggagggctggacaacactaatgctgactgcactcctgttcaaacacgaggaacacatcctcaactactccgaatcctaaaatgacaatccacttctcatttcagagaaatttattctttcaaaacattctaaaactcctacaatcccagctggtttagtacatatacaaacaaaatggcccagcagcattccaaggactgcctggaagtgaaaacaaaagctctgcaatagtaactcttaactcagcttaaggccttgcccagaactcattaggcttcaagaaatgattcgattcgctttgtctacatttaattattcacatatgaatgacatattcctgtctccaacatttactgagcttttactgtataccagaaaaggtgcctggtgcattgggtacagcacagtgcctgagttctacaacttagtgtctactgaggaagacagaatttaaactggataatgctgtgtttgaagaaatgttaataactcagataataatagtcctatatgtatgctcagctagacagactaggcctgagagccagccctttattttaaagcatatgcaccttgaaattcaaactgctaaaccacacaacaaccccaggtgacagtgggcatctggagtaagaactttctttttttttttgcaaacaaaggagaatttcttgtaactttggcgtttgtatcagtgtctatggctgcataatgagttacttcaaaacgtatggcctaggacaatagtcatgcattatctttcatggtttgcgtaggtctggaattgtggagagactgctgggcgattcttgatttgggtatctcatgcaatggcagttagatgtcagtgagctacattcatctgaagacttaactgatgatagaagattcacttccaatgtggttggcactgtggcaaactgaagtgcatgtggcaaattgatgctggctgttggccaagggccttcagttcttctctgtttggacctttctgcaggacagtgtctgtgttcccatggcaggacagctggcttcccctggatgagcaatccaaatgttcaagtggcagctgcattcctttatataatctagcacatattgttactgctgttatattgtattgatcacacagggcagccataattcattgtgggaaggtattatgctagagtatgactaccaagaggtacgtcttgaaggctagttatcccagagtaacttctggctgccctcagccaggatatctctttttatattaataaagttacataggtgagttgattgagatagtatatcttttaaatgggggttcactacctgcaaatttggacacttctttgttagctttttactgcaaatagatattaaggcaaataataagacaacccctggctttcattcaaatatcacagggaaacatacaacattcaaggtccaattaattacactaggaaaacgagatgcaaatgcttttctttaaactttaaacatatacaggatttaaaagtgttttatcataaccacagtaacatctataggctacttttctattcacttaagtgatgagctctacttcttgggtacagaatttacactgcattgcagagttctcagtaaattagtgatgtttttattttccaaaagcaaaattaatacatttcactgggacttcatgagataagccttttggatgtatcacatatgctatcatttctgcaggaaagcctgttacaggtataggaaatgaaatttctaccgggaagcctttcatctataatggcactgtgatggcttttttgaagtgttccaaatattaccttgataaggaaaaaataaaaagctatccttcatagcctgcagccacacagactatcttgtagtagtgactaggtggatgtattacaattacatcgagtactcagttaaccttaaaaatgtttgagttggtaggaacgccatgataaggattacatagagtcatacatatttctgtatcacacccgaagctcgtggaagtacgtgttcattttaggccaggacctctctaagggaaagcagaacgctctcactttgcccagagctccctagcattgcagaggaccttttgcattgcacctcctcttctgaactacctaatgtttatagtcctaaaatgaaaacatgaaagcgagatttttgaacaagtatattctcattatgcttcaaggaattctttctcaaatacgtaaatgtttgttaatattatgggaaaataggaaatacaagctagattataagttactacagtgtaacaaaaaaaattttggatacttttgaaaatatataatgctttgctaacaatgtagaaacatttgaaaaggtttccaaataaactttgctttgtatttcttttgtaatcaaaatgaccatataatcatgtctgagaaataatatggtttagtgagcaaccaaaattttatttgagctaccagtatatgaaatgtttttaattttaactaaatctaaaggattattttctaaattgtagtaaagttgtttattagctgtctcccagaagaaaaaaccggtgagagttatgatgctcctgtggtcacacaactatttgaagtaatgtatatccaaaaataaatttgctagataaaatttattatttactcttaccacaataccatgttgagtgattctagctaatttaataatttaataaagattgtctagattctacattatgacattccagttaagtggtagttggtggtattatgtaagagtaaataagatcgtgcatgcaaaagttgatctctattgacttgtttatgggttcacatttacaatttcaatatgaagcctagaatgtcttctctgtcctctatgaatctcctagcctcggccgggtatggtggctcaggcctgtaatcccagcactttgggaggccaagacaggtggatcacgaggtcaggagtttgagaccaactcctagccagcatggtgaaaccccgtctctactaaaaatacaaaaattagctgggcgtggtggcaggcacttgtaatcccagccactcaggggactgagaaaggagaatcgtttgaaccctggaggtggaggttgcagtgagctgagagtgcaccattgcactccagcctgggcaacagagcgagactctgtctcaaaaaaaaaaaaaaaaaaaaaagaatctcctatcctcacccagtatcaactggttgtctagttcactttaaatggtagcacatgattctgccagaacagtcacccaattactggagccagcttgggtgaaaggaggactaatgtgagatgcgcagagcttgagccaagcatcatggaattgctgcatggtggccctaaaagcactgaagatgttgatttatatgcctagtcagagaaagcttagcagtgagcccggatccgacatgctcctggtctttgaagccaaacatccatgttggtatatttaactcatttcaagtgtgtattctcaaatacaagtgtccttacaggtaatagaaataaagagcaacttgcattagaatttttattattttagcaatgataggctgagttttaaaaatgtagaaaattacttcaaggagcttacagtatggcatcaatgtaacattaggtattaggccaaactaaagacttagaaatagtggctgagtccactttgtctaatgactgcaaatgttggcctcaatctatatgctttgctggcattattggtttgcctaattcacctataagtacagaataaattacagttccataaatagcagtacatgatcttttgccataacaggaatgtgtatctactggactagacttgagtgaaagaaaaattaagttgtagaatcagagacattatggtatcatcaaaggaaggcaagtgagagcaggcaagctggtgcaccagcttgtgtatagattctagtagacagagattggagatggaggcttacctgggatgaacataaaagttaggagaaaaagaaccaaaaacttctggcctcctttgacctcttggaaaggctctgtgtggtctccatgaggactatatcaggaggccctctggcctgagcagaccttatgctgttgttgcctttgaagaccaacaataatgagagaaaatactgtatcacacaaagaatgcaagcagcagatgcaagaaagcttttttttttgtaaaagattttgggcatattgcttttcttctactggattagcaatgaaaacagggtgtacaaccaaggaatttatgtactaatcaatagcatccaaaaggaaaaaaaaatcatgaaatggcagtactaagaaaagtgaagaatgttaaaatacataggacaatatcataaagatatacagactacctaaaatccataatcttagccaagtgcactatttaaatcctggagttgtcaatatttattctcaggaaaaatgtaatgcgttggccttttagaaacaatgcactaatcttaggttagcactaacctaagattttttgcaagtatgttaaaaaagtgtgaaacttgctatatgacatatttccaggcagaatgccaggagggctgtgtgaaaggagcctggaagtgatgcagtgtggagacccagctgtcaagcatgagcagtaagaaaattatcttccaagatgaagtcattgcagatgttcgaaatccacgtcaagcatgtgcagtaagaaaattatcttccaggatgaagtcattgcagatgttcgaaatccacgtcaagcatgcgcagtaagaaaattatcttccagaaggaagtcattgcagattttcgaaatccacgtcaagcatgcgcagtaagaaaattatcttccaggaggaagtcattgcagattttcgaaatccacgtcaagcatgcgcagtaagaaaattatcttccaggaggaagtcattgcagatgttcgaaatccacgtcaagcatgcgcagtaagaaaattatcttccaggaggaagtcattgcagattttcgaaatccacgtcaagcatgcgcagtaagaagattatcttccaggaggaagtcattgcagattttcgaaatccacgtcaagcatgcgcagtaagaaaattatcttcctggatgaagtcattgcagatgttcgaaatccatgtcaagcatgcgtagtaagaaaattatcttccaggaggaagtcattgcagattttcgagatgcacttgaaataagtatttcaacatttttagtttcacatctgtggccagctaaaatagtttccacgtgagtttacagcgaagtttcatccaaatatccttggaattctaacaacacttctttctaggactaaagaaaattcagcatctgaattaaaagaaggtgcctgtggtccttatcaaatatttgacttacgttaagaataatctatactctattatttcttcttccccagaagatttcttcttatttaacttctgtttttatagatttatatttattacactttaattttttgtaccatctctaccctaaaaagtgttaagttttactcctattatgttaacaaatagtcaaataatactaaactgaccgttaatataccttagcagggctgggcattgtggttcatgcctgtaatcccagcactttggaaggccgaggtgggtggatcagttgaggtcaggagttcgagatcagcctggccaacatggcaaaaccccgactgtactaaaaaaatacaaatattagccaggcgtggtgggggcatctatagtcctagctactcaggaggctgaggcaggagaatcacttgaacccgggaggcgaaggttgcagtgagctgagattgtgccagtgcactccagactgggtgacagaacgagactctgtctcaaaaaaatccaaatatatatatatatataaggtgtgtgtgtgtgtgtgtgtgtgtgtgtgtgtatatatatatatatatatataccttagcagtataatcaccatgtggcattcccctccaaaaagtcagaatcattggaaagatttctttaaaaaactaaaaatttctttaaagaaatttaggtacaaactgattattattatttttcactatttggtgttatacatttaatttttaaaaagcagttaacgaaagagtgaattattaagattttggagtcagaactggactctttcccacgttatgtaggatctcatgaggttaaaggagtttccaacatttacgggaaatgaacattggcgctattacccagctcttgaagttaatccaacattattaggttaatgatagcattgctattcttgcaagcattggcaatctccagagataaacctaagaaaaaacaaaaatactgtctcaccttgagcctgcactaagtgagaatcttatgcaactagccaaaattagacaggcaaaggccaaatgccagtgcagagaaactctgcaataaagccagccatggggttgttaccctagtgcaaagagtatgtaggaagctcagaaaattaggaagtttgtttagctttttactgaggagtggggaaagctttggactccactaggcctgtgtttgaattccagctttaccacttattagaaggataatcttggctaagttacttatcttcgctgaagttctggttgcttatttgtaaattgagaatattaatgtctggtttatacagatattagtagcaaattaacatgcttttgccaagtatctgctgcaatacacactggttaccaagaaattggtaaatgattaaaatgaatcatcggacaccttttagactgggtagagggaatgcaaatgggctgtgtgtacgtctattttgttttctttcttaaatgagcatgccaagatgcaaaggttttttatttcttttaatcattgtttgatacttggaaatgcctcacttccagtcagaggctctgaacagcaactagtattttcctagatgaagaattactgattatttccccatgggcaatcattacctagggaagaaggtagctttgctcatcacctgcacccaccggtgccccagctcttcttggtggcttctttcaacaggattaagctgtgctccaactgccttcttgctatttgggctcctatatgttgtgtggcccatcccagccctgcgcacaccaccctcactgagctaggaggcatttggagaacacaaactagcctgcactttggcaggactcacacatccattcaaaacaagaagtgatcgggaagggctagcaccttactttctcctcatttacataaaatgtctaagaattgagggtcaggtttttttgtttttttttttttttttctggaggaactgaaaggattttaaaatgaagctttgggtgttggggacaaaaagtgtctggggtcttggcctctgtgactttcttttagggactttggactggacagtgggtaagtctttcagttcctttgccagggcatcagacccccatacccgactttatattctacatttgggctgagtctgttctgtgccagatgctgggccagatgctggcatcccagcagagtagagaagggccccctgggcacatgtaatgcagatactggagaagagagaggggtccagggtgaggtggttcatgtccctccccgagcacagtacgtggcacagagaggctccacccatggcagcagtgttgttaagacatctgtccttggagacctctgaaagctccacccatggcagtggtgttattaacacacctgtccttagagacctttggcttgggagtcagtcaccttttgacctgagttaggaaattcctagggtcaggctcagaaaagctgcccctcaaccttgctgtgtgctaagtgaggaagtagtgcatttaattttcattttcttattaaaccctctggcttttttcatcaggatagaaacatagttagagacccaaaattggatagaaacgttgttagagatccgtaagtgtcactcttgatagaaatgaaagatgacgattggagctttccttgtgctgggtgtcttgggaagctggacctgggccctagaggtcagagaggaagggtgtctgtctcctcaggcgccttcctcggcctagccccacactgcccagagtcgctgccaacaccctcctcctgcaatgaaacctggtccattgccactgcagtccccagggccagcccgaagaacataattaactcaagaattgcatgaattcagccttctcctaaaataacaccccagtcactgacaaccacacgagtttacctcagttctctgctttgcagagaatatttttgtgttgttggctctgccttccccacgagaccgtgtgttttacaaggaccttgtctgtcacgttcactgttgtgttccccagcactcagaggaattccgccatggagttagcacagacagcgctggttggaggaatgagtgagtgcatctactcagccagaggccaccttgtttcattgcttgtcctcccatgcagatttccacctgacgcattcttctgtgcttttcctggcaataaggtgaagaaaaggcagcattcgaaggatgtttagaacaccatttcagataccacacttgtgtggctttcatgataaaatgctctgttgattccacttttaagtcttcatactttagactttgaggtacacaccttggctaagaaccttagggactatttgcagacaagtggaaaatttctctctctctctctctctctctctctctctctctctctctctctctctctctgtgtgtgtgtgtgtgtgtgtgtgttgtgaggagggtttataagaataaacactagaccattaatttttattttcttcttaacttcaataatttgagcaattattatcgttgtttctcaatttctctgtatgaacaacaaaaattattcgtaacagccttctcacaataagattagagaatttgtgcttgtaaattgagcttaagaactattactaaggaaaaaaataagcttttgttgagaataataacctttagtataaaaattatcacagccttccagtaaacatttggttggagaaatttttttttttttttttttttgcttattttttcttagtgtgtaattactggattttcaattcttgttgcctttatgaaccttctaaaatgtttcattcattttattcacatcattgcttcaaaaattctattagcatattttgtagtgtgcaccctagtatagtaatacttttgtgtaacttaaaaataaataaataaatgaatctatatttggggtccctgctcaagtcgactttttaattaacttccattttaaattgtggacacagagaacaaggtatttacatcatttagaaaagacagggattctgccttggggagataattgaatgcaatgttaccttattgacgtagtctatatttatttgagagtgacttctgcgtctgcttagtcataaaacattaccctgcaaaaaaggtttagattgagtttgaaactataaaatcatattttagattttgattggaatctcaatacaacctaccaatttttctttctccatctgtgttcatctgtctgtctctgtcccttatacctgcgcacacacatgcatacacgcacatatgtgcacacgtacgtacacgcatatttcacagacaggctggggcggaacccagcacaggcacggggatgtgcagggcagcctcctgagggccagcccagtgctggacccaaaccattctgggagtccagggaacaccaagctcagccttaccagacccaccagaggaatcagcaagatgaagagaacccacctctgacaagtacgagtggactttctcatgtttctgttttgtggcaggagcagagacaagatttcacattaggtgaaaatatttcagttacataacatatagtttcacataaactatagggttaaaaatgagtttaatttttagtataaatatacttttaaacttgacataaaattatatgtttttattatataccacgtgctgttttgaagtagacagacactgtggcacggttaaatttagcaaattatcaaatgtattacctcacttagttagcattttgctgggagaacacaccatccagtctctcagcattttccacaatacatcgtcattaactgtagtccccatgcatgcagtgtaatttaagtcagctaaatatttaatgattgagtcactaggagatggttgactctatatttatatgtatcctgcatctgcataggcacctctttttttaaaaaaaatcaaaatacaattggcgggttagtcatttatagaaattgatttttccaagattatactgagcttgtcattctcaataggacaagaggacctattttacttattttgacatagatgaaatttgaagttactttttgaaaaactttggaatctgaaacttttttttttagggaaaaaaccgaactgaataacattcaagttggtttttaaaagattgaaattaatttccttttgttcagaaaacaatatatcatttttattttcccaaagaaatctgtgaaggaccaaaaagtcagggatggattcaagcagaatgaaggtaataaactttccctcccactccatcgtgtctgcatgaaactcagtaatgagcacaggaaggcctctgcctgtggtcagccttgtgaagatgagaaaggagagcgggaaaggacctgctgaaatagcgcgcagtcaagttatttaaacaccacggtgtcacatttgatgtttgggatgagttagatctaacagatgttatcctcctcaggatagtgcacatatcaaagggagcagtaaaaagccaccgcaattagctctacaagccgttaatgatattatcaggttggttattaataagtaatagagaaagtttttgtgtggtgacatttatgtatgattgtcttcctgttttattactggaatgactagctaatataaaagctgttaaatggttctctttttgctttataccatgttgggcgtacaggggttgcagataactggtgtgtttatgttatctgggtgaagtggcatgcaaacctgctaccattggtggttaaaacttagtttattactcaattccttgagggaatggggacatactccctatttcactttcatgtgagttccataagtatcttgatggtattttcaggttttttaaaaagataattaatatgattctgtatgtctttgttaaagaaatagaataggctgcaggagttaaatttcatgaggggggaaatactatgtctaaaactacttaagtcatgactttactgtgatataaacataggccccttcatactaaagtgggacacagagcaacaaaagggaggggaaggcagggtattttagtgaaaataaagacttcgaagctaatgtaatgctgcctctgatgcctacttactctacttccttaaacaaatcatttctcctctctgcattgcagctttctgacctgtgaaataggaaaaagtaatacccgccatataagacaatttaaagaaatgcagcgtgtaataaatatttgctggtatcacaggcacagctcattttaccatgcttccctttagcatgctttgcagataatgagtgttttttttttttgtttttttttttttttacaaattgaagctttgtggcaaccctgtatcaagcaagtctattagcagcaccatctttccaacaacatgtgctcactctatctctatcatttggtaattcttgcaatattttaaagtttatcactttatctgctttggtgatctgtgagcggtgatctttgatcttattgttttggagtgcgatgaactgctcccttacaaggtggcaaacttaatgtgtgtcttctgactgctccactgaccagcagttcccccacctctcttcctctccttgggcttccctattctcggagacaaaataatattgaaatcaggccagctaataatcctacagtggcctctgagcattcaagtgaaaggaggagttgcaaatctctcactttaaatcaaaagctaggaataatttagctcaatgaggaagccatgtccaaaactgagacaggttgaaaactaggcctcttgtgccaaatagccaatttgtgaatgcaaaggaaaaattcttgagggaagtgctactccagtgaacacataaataatatgaatgtgagacagtctcattgctgatgtggagaacattttagtggtctgaatagaagttcaagccagttacaacattccattgagccaagacctgattcagacaagggtctaactctttttaatatcatgaaggctgagagaggtgaggaagatgcacaagaaacatttgaaggtagtagaggttggttgatgaagttgaaggagagaagccatctccactgcatagacatgtaaggtgaagcagcaagtgctgatgtagaagctgcagcaagtcacccagaagttctggttatgatcatcgatgaaggtgacaacagtaaacaacagatcttcagtgtagatgaaacagccttctattggaagatgctatccaggactttcatagctaaagagaaaaaatcaatgcatggcttcaaagcttccaagaacagcctgcccttttgtgaagggcaaatgtacctggtgactttaagttgaagctaatgctcatttaccattctgatagtcctagggcccttaaggattatgctgaatctactctgaccttgctttgtaaatgcaacaacacagcctggatgatggtacctgtgtttagggcatactcgagtgaatattttaagtccactgttgagccttactgtgccctaatgctcagaaaaaaatgactcttcagaacattaccactcattcatgatgcagctggttacccaagagctctgatggagatgttcaaggaggtgaatgttgttttcatgcttgctaacataacggtcattctgtagcccatgaatcaaggagtaattctaattttcaagtcttattattcaagaaatacatttcattaggctataactgccataggtagggatgcctctaatggaactgggaaaagttaattggaaataattcaccattctagatgtcattaagaaaatttgtgattcatgggaagaggtcaaaatattaacattaacatgagtttggaagaagtggattccagtcctcatggatgactttgaggtcttcaagacttcagcacaggaagtcatcgcagatgtggtgaaaatagcaagagatctagaattaaattggagcctgaagatgtgaccaaattgctgcaatctcataataaaacatgaacaggtgaggagttgcttcttacggatgaacaaagaaagcagtttattgagatggaatgtgctcctggtgaagatgctgtgaacgttgttgaaatgacatccaaggatttagatactgcataacttagctgataaagcagtggctttgagagggtttgagaggattaactccaaatttgaaaatacattctactctgggtaaaatgctatcagcatcatatgctatggagaaatctttcatgaaagaaagagccaatcagtgcagcaaacttcactgttgtctttttataagaaattgccacagtcatcccaacttctagcaaccaccatcctagtcagtcagcagtcatcaatatcaaagcaagaccttccatgagcaaaaagattacagttgttgaaggctcgggtaattgttagcattttttagcaataacgtatttttaaattaaagtttgtatgctgtttttatatacataatgctattatacgcttaatagactacagcattgtataaatgtaacatttctattcactaggaaaccacaaaacttgtatgcctccctgtattgctatattcactttacacagtggtcagaaactgaacccttagtatctctgaggtatgcctgtacatgttcctcaagttttcattattatttaattattcaggaaatgtatttaattggatttccatttctagttaacagttgcttcttttgtgagattaatattatttgcctggttttaaggatttgttttggctgagatggatcatcagcatcattaggtgactaaatacgtcttgtactatttaaccttatttatgactctgagtgggggagaatactaccgattataggataaaataaaaatctagttttaattatcaaaaagtaaatgccagcaaaatcttgctactttctcagaaagcagatatccagaaatttttgaccaataaccccctaagtgtgacccacgagtctgggaggtctgcttgtgtgtctcctgatctgcaattgtgctgtgttataagggaaaaagaaaaacaattctactaatgaatgcagttttccttattctgttgaatttttacttggagttatgcctgaagtctaaggacgtaatgtggaaaagagaatgtatattaactatcagtatagaatattaatggcctcactcacttcatccacccagctatttgttagcactttatttctttggactaataaaaaaaaatcagaaaaaagtgcgtaatggtaaaaacatatcatttttaactgaggcatttataaagagatagtgggggggacaggtatagcatttaccagagatagtctcatcttttgagagtattgtggtgtttaatattaaggacagcttatacacaatagaaacatgataaatggaaacatcttttgttccacagatggggattttaagctactgtaattataatgagggtataagtgaatgtaattaagttacacacaaattcaccttggaggtagctgtaaattgcttactaaaagtatcacttagagaggaaaaagtaaaaggtaataggcagctgccagttcatctcaaaaatcgaattgagtggggaaaattaggatacagaagatactgtgaaaattttttacattactgaaagggaggagggcaacaatagttatagaaatataattgaaaaacagggtaatttctatttattgctgcatgctatgaggatgtgacgggggagtaaagagaactttaggaaacatcaggaactgtcttccaatggagacgatgcccagacactgtcttttgagctgagtggaatgactcaggctaggaaaggacaaggacttcaaggtggggaatcaaagatgcaggtgtgctctgcagaggaagggacacagtgggcttatccagaaatagctggaagaggaagaacggttcgcctgcggatcctgctctaagtctggctgaatccatggcggttttccttatctggaccacggcggccactctggtcgctggactctcccatgtggctgttgtagcttctcaaaaagggaggcttgacagtggcccagaaagactgcccataggtccagtgatacagactcttaaacaccttacttccttatttatgtgctgaatgtcttcatttccaacacctcccattcactgagcgccagttgaaattgacaatttgaaaacaatgctgcaaggtggaatttttcaaggtttttttttaaacagtagagagcattgaagcccacagaagtatatttctcaaggcttatatctagcaaatgatagaatctgaatgagtatctttaactccaaagccacaactccttccactacttgataccacctctcctgtgtctttgtgcaaagcaaattggttcatgcagccttgatgttaatgatacatatatatatgtatatatacatatatatatatatacacacatatatatgtgtgtatatatacatatatatacacacatatatatgtgtgtatatatacatatatatatatacacacatatatatatgtgtgtatatatatatatatagctttaaactattatccaggtacacatttcctttcctaaatgaataatgaatacttgctgttctctatgatgataccaacacccatgtattcagaactctgtgttcctttgagaaatctcttctgtaaactgatgacatgtcacattataatgctatcactatacttgatttcaaatttacttgccctaataagccacatcagcatttaattcactatttactacccaaagtgccaaattacagtctattagatgaaatattaaaatggaaggtactcgataaagtacagaatatggcaacataattttaaaaagatgttgcattccagtataatatactagtgggtgtcttataccctgtttatctctggatattgaattgttttgacagctgtatgcacaagtgagtcccgcagggtttctgtttacattaaagcttccaaacgctgtctcccttggattggaatgactggttcacctcggaattcaacctctctgccggcatgttcatcagctacctcagaagtcttctctgaaataaaaagcagatattgtataaggctactaaattgaatccaaatgctccatttcatttacacaagcatttttttaaagtgccttaaaatctattgtctgctcataccatgtactgtgacaatcataatggaggataatatgtgacgtccccaggagacgccaaggaaacctgcctagctctgtccacatgcatgctctcaggacctttggcttcaccagccagaggcgggtccatgcgggaaaggcattgaggctcagtttgggaggtgtcggatgggatcagaatgatactggagaggagagttaaggggattagcctgaccctgaatgggagatttatttagaaacttgaagtagtaagatagttgagttagtatttatttagtcttgaggggtagagaaagaagtatgtcaaatatctttctcttaccccttctaatctcctcaaagcccacaaaaagtagaaaatgtaactgctgaatacaagtaatctcccaattcatagatctgggcctttcagaaggacaatgaattgaggactcctactcccagcccataggaaccatgtgagaaatgggaatttatcactcatggagtgatgagacctttgtaaatgctggtatccagccatcttcccagcttccctggcaatggcactcaaattcaacagttcttaaaatcatgtggtcaagcaaaactttaggccaaatatagtttagagatgtttagacctctgagagaaatagaaggaaaacattgacttggttaaaatgtgtaagaaggggagaggagtttagagaataaacagctttgatctatttaaagtatttgaataaaggcctgccagttgttttcagatacttgaaatgtggcttctcaaggtgagttcttgatattgagtcactaccaagcttccattaaataaatcatggcacctctgtgttgttgcctgtggctctgcagagacagccaagtgtggaatccccttccaggtcttatttgggggcatttttgaggaatcatcttaaaactgaccccaaatgccccattagaggctccttcaggtttagaatatgcagagcataagtttcctaagtagttgtggttttatggtaagcaactaagcagacctttcactcagcatgttctgtttcttcttgtaataaagtttaagctcatttaacagttcttgagactgccaggtagaacaaaggccatttgaattctgtgcataggcacttgataactagcctcaccagtcttattatcctgaaaatacaagactaactatagcagacgaaagcttgaataatcatgccttaaaataaactggattaataaaagtgggaaattgcttttgctgatgacgttgctcttcttacatagaaacatccgttggcctgtgggtgttcaggcccccaggggcccacctcattgaaaacacattaaactgtacttttggtagccgctgctaagtggaatccagttttctctctgataattgttttgtcatctcctttatgatcttcgattagactgataatctgggatttaggaagaacgagagacagaaaaaagtattcttgaaacccaaataaattgtttcacttaaaatagatggcaggtttatttcagcacttgccttgtttccctttaaatttctgtctcttctctgtccttttattctacacatagaaagaaaggggagaaaagaactccagatagatggtctttctttatctcttaccttacatttgtaaacctagcttgatttcgtgatgttaaagtattgcctttgaccatgctgtgtgaatcccgacgagaaagggaatggattgtaccaaagggagtgaacgatgcccacactctgctgggagagactgggatcctcttgttttactaggcgttctcccaagcacatgatgctttgtttttctttcctcctcttgcccaagaaccatctggctttcacttgaaattccacattgccttaagcatgaatagtttggagtattaataaccaaaacatgccaagctccaatggtcaactctaatacctgctggggtattgctttgggttgctaatctccgtgctgtcctcttactctcccgattagcactgcctggttgaccaaggtagatggtctcatatgacttacatgcctgtcccagtgctggcagccccttctgtgatggttcagtctttccatggccatggcatgacatcagggagccgatctgtaggctggccatgggcctgtggcgtgtgttggtctaagaactccatccagtgtgatgaatcgaactgaatagatcccctcttttggacagtttgaactagattcaaggagaattttagtctgcacccagagaaatcaaagaaagagacaaaaggagtggcccccgtcagggcactcaagaaggcagccaagaatatctgcctctggggttgaaaccatgagaagagctgtggtgtcaccgagcgtggtgtcactggcctcttggccagtcctctgaagtgactggtcttccttaatgccagcccagtcctctctgtctgtatggaatttgtatgcacattctgtgttccttacacattcacatagcctagtcagcctaccagtctgcagatttggatttgaatattagttcaaccaagttactcggagcagaaatacacttttattactttagagggtattggctaactgtatggatgcacagggaaatgagtaagaaacaaaaagcatcaccctccaccatcctcttaggatggaagtgcaaccagaacgtcctcgttcatgatttgggacccatctgtagctgcagcggttcctgctaagtgggcactgtgtccagcgcatgactcaagttgttgctgtctctacctcccagactgggcttctcctcctgcctttactttgtcttcctcctcctctctcctcgtggtctcttcctacctctctctttccctctccctctccccctcttcctccccctttcccctccccctcccccctccctccctctccctctccctgttcttctccttctgcctctctctctcctcctcccctccccctccccctccctttccctctcactctccgtctccctctcccactccctccctctccccttccctttccccctctctctccgtgtgtccatttcttggtttcggcactactttgctgtctagtatgtttacacatttaatattcaagctgtctgggagagaagcattgcctggtgtagtaactcccctctctggaggcccctggccccaggtattcatttgtaggctgcctctctctcaggggatgacttcggctcctcagtgccaaggagagtagggtcatctttgcacagtggctgcgtgtacagcaggaataccctgtatagcttttctacacggcggggaaacatgaatgtgagggattacagtggtcaggctgtggaccccacaaacataaggatccatgtggatatgtgtaaaactggtaatataatacaatttgccactctagtgttcttttttcttcttctgagtatctttttcaacttcttttatggctaaattcagcgtattctaggatgggtaaagtaatcaggagtaacaaaattcccttattcacacaagggtgcggtctgtgttctttggaggcaaatcctgttgtcactgcctcctccagtgggtgtctggagctccagtgggcatgaagttggggcaaatgagggagacagaatctagtctcccaactaagaaaacactatgatatctgctaagtattagaatgaagagctgaagaggatgttcttgtttctcaagagttggattcctcaatcctctagcatggaagcttcccagggaggatggtgattaactggagttttgaagagtgtgtacacattcccagatgcacagggcacagacaggggactcagacctagtagctgatgtcccagacaagaaccgtgggtccatgtccacccaaaattcagtgaaaagtatatttacttgtgtatatgtgttatatgttaatatgtatatatatgtatatatatctagagagagagagtggggtgtgtgtttgtgtgtgtgtgtgtgtgtgtgtacaaagccatatttgtatcagattggcagagtctttcttgtactaaggaattttcaaaaccattttgtaagtacatgtctagtatccctatccaaaattcataggaccataagtgttctgtatttcagactatttttctggagttttgaatatttacagtatacttaactgggtgaacattccaaatccaaaatctagaacgttccagtgagcatttcctttaagtatcctgaaacaacataagcaactccatgcagtctatgacacatgtttattaaaccatgttaaggctcttttgtagacaccaaatacaaaaagaaatggaaaaaaaaaaaaacaggagttgataagcagatatggatcttcttacccgctccccacccctactccagtggcttttttgaagtattttttgcttgaaaaaataccagcttgagaccctggttactcatcactgtggctcacacttgaaggtgttacatgaagtttagtctaaagctgtttcattctatttataacgtttggcctaaagattttgtccttcactcttctcaggatacatgacttattaggtctctttttccatagtttaaaataaatgggacagtcattataaatgcatccctcataatagactccataagaaattctactacaaagactattgttacacaaaagactaaattctgttactaaaattgttcctaataataaaatcacactagattatccattgactacacaaaaagaatctgttttgttatgaacactttttgttatacataaaaattataaagattcaattgtgagagattaacagactacttggctaaaacaaatactatttatctaactcacgtttaaaactcttcaattttaattgattcatagagactctgaccagaaaccatatttcaaactcttaatattatcttcctaatagtcataatagtagcctccccaaaatactatattttctcaaatgtttacatacagacatctataaactgtcaactggtccctcttcaacccaaacaacaaaaactccaaaaagtgatcaacaagtcactgtaacatataagacacactgagaccgaaaactgaaaataataatagctaaaagtaccacgaagccaacagtaaagtttgggtcaccctctcacctatccaataaatgaataaataaataaataaacaaacaaacaaataaataaataaaacataaaattataagaggctattgcttttgactaaactcatgtactaggctccaaccgaccagaccaaaccaaactaaagtcactcatactaaatatcacataaacaaactaaaacttaaaaaaaaaaaaaaactatagcagaccaggttttatctcctaaaatcaaaaaatttcaacacacagaggttccttctactctaatccttacagaaaagtaacctaaagtccttcttttcactttacaaaacccactatccaactacttcccaataaaatttaaaactgtgtgaatatgtttataatagtgacaaaatgtcatcagtgcctagagttttggttaacccctcatgatttttggaggttgaccataaagagagaattgttaaagcaaatttagcctaagctgcctccttgcgtattttaagtctggcctaaagttttccctgtacagagtaaactgtgtaatcaggctataacctcctcttgttccaatcacgaagatcaccaagttttggcctctgaaaggtgacaaattcttcaaagcagttcaaatagacaccaaggtgtaaccaatacaactgtttgtgtacctgacttccattttctgtacatcattttccttttttttccataagtcttctttgaccacacaaaaacactagtctctctaaacctattctagtttgagggctatgtgattcactttactcaattaaactctattaaatataatttttaagtgcttttttgaacaaaggtttgtgactgtaaatatttaataattttctttcttaagatgttgttaaacttgttcttctatgtcaccaggaacaaaagatatgtaagaagggtattaaaatttcctatataagggtattaagaatttcctataaaggaagtattacataggcagtcatcagtttctcataactttctttttcccaaatcccaacaagaattcctaattcactcagtcaaaatattgcacattttagcttcataagttatgaaattaagaaaaaaaatcaatcccttacccgtgttggaaaagaaagtactcagggttctggttaatgtttaaggaagaggttagaaatgtcaaataacaggtcaaataagagttatagattaacatccaacaaagaaattgtccaagaaccatagtttattaactcaacaaacacaaaagaggcttactactacttattgaccaataagttgtaaacttaaaattgccaaactcacctttacatagccaaatttttctcaaaagaaaacttaaacttgcaatgaaattctgttttacatgaaagctccgttgaagtagctattatattactagttacacatcgttaaccatttaaaccattatttttttccaaatattctgttccagttattcaggtctcattagttgtggtaggtaaatgtactttctcctcactgtcttagtctctcaaagagatctattaattatttttagtgctagggaagggaattgacctgaaaaagtactcctgataaaggtgcatggtctacatccacataaaattgcctactcctccggtagttgacaccgtgataaacaaaatcaacacatctagagaatcttccattctacatactcagtctttttctccactgaaatttcttgcctctcttgaaaatgattttttaaacatgatatggtaaagatacacgggctttagtgtcaggtacaccagactgcaaagtccccttcttaactgtattttaaaaaattttatttattcatttatttgtaatttacaattttttataatttcaacttttattttacattcaggtggtacctgtgtaggtttgctggatgggtatattgcgtgatgctgagctttggggttcaaatcattctgcaacgcaagtagtgagcatagcaccgaatagttagtttttcaaccctccctcctccctcactcccctctctagtagtccccagtgtctcttgttgccatatttatgtccgtgtttacccattgcttaaccctctcggaagttatttttcttctgataaaatggagatgctaataccatcttacagggctgtcgtgaggatcgcatgtgtagcacgtgtgagtaaactcagcgccgtgaatggagcacagcgtgtaaatgagagtgtcccagagtctccagggacaagtttctgggatgtttacttctgcctctggcctggaggtttgcatgcaaatagaccattagaaataatggactgcttacagggacacagccacttggcactgacttccgtcaaatctctagccaaagatgttccctggctgcaaaacgacatggaatctgtaatccttgttttctctatagctgtgcagggacaacagactgaaggacaaaaagtagaaaagaaattaaggaaaccagtatgtccttcaggaggaggccagaaggatggcgtccactccagctttctcctgggcttccaggaggctggacagagggcatctggcagcagctccatcttcttgaagagctttgtgcacttctgtcaagaaggtgctggagcaaaataatctgccaatcatgcccttctaatgtttccacttcagcaagctcattcatttcaaactgaggagcctcaagagcctcaacatcccacagggctgccatgtttgaggaaggcggagaagggacccatagtaagaaggggaggtgaagaaacataataacatgctgctgtacaattacccaatttgttggcatcacagaactggaaatagaagtgatgagtggagcaaaaataaaggttaggattcttaggcagtgtacacagtaccattgagtaccattgtggaatggatgccataaataataatcgctaagttttatcgaatggttattatataccagataacaccttaattgtgttattttatttggtcctcacagcaaccagtggagtagataatgttattctcatgtttataaatgaggaaactgagtccagagaaatgaaataacttgtatttagggtcaccccagtagaaagtgagaaagccgggtttgaaagtctgatgttcacatcccagaattcagctgaaataatacttaggaagagtcctgtgtgtgttggcagtcagaactcgcaaagctgcatgagggcggctgtgagtcaccaagagactctgatgattagcaacacctggtcaccacactgctttctaaagaagacagttcctattacctgcagggtgctgctttgttgcctgaggatttgggtcggggcccagagtgaactgcttgaaataatacatgagcacttagcagtgtcccttcttctctaatctgtccccaggaagcatcccgcctctcctgggagcaaatgttgaacaaatggattgaaaggataccaaataattatcttgccctaagcatgaatcgcttcaccttcccacgatggccttctgtcttcgtctggctttgacttgggtcaggatgtttgataaccagtgatggccattgggctaatagcagtagcattctggacaagaagccatgtacggaaaacacccatttggctcataagttctgagtagctgcgttccatgctcagtaccatttgttcaatgatgcccgtgagccaagctgttggtttttcagtatcactcactaaactctttttccagacacaagaagtcctataggactcttagtgaactactaatatcccacataatactaccattcatatgccaggacatactagtaacatctactctggagatgctgataactcaattagttgctatgactgtattcatttgtagtgctttacataggttggacagagaaatattgcatggaataagtaaacgtgaatttcactttggctttgccaccagcttccatttttgtaagttcatttctccaagaaatctaagtagattcacctttctttctctcccacccctccaattaaagtaaccattatgctagtttaatgggataagtagtacttttttcatcttttgtttggtaataaaatgtaatttggggaaatgaagttgtttcctggatacctcaagccaataaaatagtgacacaaggacgaatatttatacaacatccttggtttttcagtccagtgtccttatcttttgccttagttagtgatgttaaaatgctatgcctttttttctatattaaaaaaaaatctctgaattcgaaagggtcaatgagatatatctccatgagaggcaacatccaaatcatctgccaggtgatcccaccttgtcacaaaggattgtgactgacagcagaaagaaagcaggcatgagaaaacgagatgcagtcaagagctgacgatcacatcaaaaaggaaagaaaggtgaaacatttcgactacagtgaaatttgctgttaagctttttctatggagagaaaagctttcttcatagagaaaaccatatttcaagaattaccactcaaaaagcgtaggtggccacttgatgatagagaggccatgtgtactcattcttgatgacaagtacagggtgacctaattgggggctttcactccagcaaactgccccgattccactgaccccatgacgaggatgcttatttttccaaatagccacaagtcttgaggcaggataccttcagggttggctaactcagctcctaggtctgccatccttagtgctatgcaaaatgtagacgggctttgtaggggaaaaggggttatttctgttattataaagaggggagttcacctaaacatcatcagctaccctgttgttggttcctatccgtggatgctaatttctgccagtgatctctgccctggggaggatgaagagctgaaatacatttaaactacgtactcaatagactgttggacttaatttgaaactaatatctttacttttttctctttgtgagtaaataaaacccttaattgacattaccagatgctgaactagacaaatggctgatatttttgtggaatgtgtacaattgtatcacccacacaaattggctaatgatctaaatattttttaaaagacattgggtagtatagtaagagtcacacctgatgttcaagggtagatttatggcactgttatcttttaatcatgtgaaaattttctcaggtggaatgatatttcatagaactagagttttcttagctagagacggcacagcacctccaacttttctgtttcgagaactgcctgttcccttgtgttcccttgacctcagacagtgaaatgacatttgccaattcaatataaaaatagcaacaaaagaacttattccagaaagtttcctgttttatttctttttggatacatatttgagtgggattttgaagctaacctgaagtataagggaacttcattatgggtttatttgacttactatatgtcacctttgcaaccaacaagcttatgctttatttcattttctgtgaaaacgaaggaaatgggcaaaaatctcaccaaaatatggatggggtaatgagtgctagtgtccatgcaacatgtaaccatggcttagctgataaaaaagaaattcctattgatgttatctttttaatcacaaggtaattgtgctgacagctaagagaactaggccaatattataagtagcctaagggagcagcagagacacaggtttggctctctgtaattgtgaaaaaacacttggttgttggcatcacaaattatgctatatcaattagagaaaatatttgaaggacgttgaagagttgagagcaggtgactagctagctgccactagttagttgtctgcattgaggtattgctttggcctaaatcctttgcctttctttcctagatgttctatacattcagtgagaagtcagcctgtgtttgcataagcatttctgtcactgccaacccagctctgatgacagagtgtgagcttctgtgctgctggtacctttgggattcgtgctgactcgtgacaagcctaggagggccacagaaagaaggatgtaaggatgtaagaaggatgaccttccatgtcttcaagaatagttgcgttttaagaaacaatgagacttccatgtcctgatggcagtcgatgtagaaattcctggcatttggcaacagcatggaatcacattctgtagtaatacaaagagtctggcttctggcttctcaggtagattcaacaatgtcagctctcctggtaactgctctaaaaatacattttagagtcataagaagcccggttttgacccctcactctcttacctgtgtagacacccagatatgctccatgcactcttgggtgtgagagtgattccctgttctcccaacccttccccagccacgccctttgtgctgctccgcaatgcttggctcgggaggaaactgtatttcccagatgcccttgccagcgagttcctgtgacatctgctcagtggatccaaaggcaggtcaggggaaaggcgctgtcattttctcttttctacccttccctctctcctgcttctggaagtgtctgtgatcccttctccatgccactcctccgtgactgggaggcagtgccttggtggtttctacccactcagtcggcccatcctcaggggtcctggcatgcactcagcactcagaagttctgataaagtactttcttgagtttcctgagtcctgggggcagtagctgtttcctacagtttaccaggtgatctaatctcattctatcccttttttctttctttttttctctttctgctctgctaacattttgtaacagatttcttatattcagtgcactcttaagaagtacctaatacatcttgtatgtggtgggattaatagtactttaaatagtacacacaacctgcctgtaaaaggcctgaaaagagctgtgaaataatttatactccttttcttattgagtccacatttaggaatctatcctgtgaatgaaatcagagatggtcctggagattttatgagcatgggttttcattggtgggttaatttttaataacagaaaaaggaattacttgtagaacaataggaaccattaaaatacactcatacaaattacaatacacatacacattaagatactgtaccattattaaaaatcacattttcaaaagaaaatgttcatagcataagcgaaaaaacagtgtattagcctgtcctcacactgctctaaaggactgcccaaaactgtgtaattaataaaggaaagaggtttaattgactcacagttctgcatggctggagaggcctcagtgaacttacaatcatggtggaaggggaagcaaacatgtccttcatcacatgatggcagcaaggagaactgccgagcaaaaggggaaaaagtccctgataaaaccatcagctcccctgagaactcattcacatcatgagaacagcaggcatgggggtaactggcctcaggattcaactacctcccaccgggtccctcccgtaacacatggggattatgggaactacaattcgagatgagatttgggtagggacacagccaaaccatatcaaactgtatacaaaagagtatgagggaatgttgtataagggaataaacattttaattttttaaaatttattttattttgagatggagtttcactcttgttgcccaggctggcatggaatggtgcaatctctagtcaccgcaacctccacctcccgggttcaagctattctcctgtctcagcctcccaagtagctgggattatgtaccaccacacccagctaattttgtattttttatagaggcggggtttctccatgttggtcaggctggtctcgaactcccgacctcaggtgatccacccacctcggcctcccaaagtgctgggattacaggcatgacccatcgtgcctggccgggaataaacatttttataaacaccactttataggtatgatcaaagaaacatttctattaacacacctttacagggaatgcagtggaaagaaatcaggcaagtttctattggggtgatttttattttcttttctgtgtttatttttgaaaatttaaagaaatgtccaccatgactattttttaataagcaaaagacaattaatacattttaaaagaataatagttcttattatgccacatataataataaatcccatttggatataagatctaagaaagccaaccaaaatcctttcaatcttgtataataatggaagaaaactagaatgacattctgtaatcccaaaagataaaagaataaaaaagattttcaacaatgattaatttggagataaaacacaaatgtgataaatgtaaaaagattctttagaacaaggtgatttttaatttacaaaaaaattattataacctgtcaaattggcattataaaactgcatttgtgggaaaagggccgttgccataatattggtgacaatataaattgccattaaagcttttttgcagtacccatggcaagtacccatcaatattttgtgtgtacaaatctttgggcagtaattttacttcgaggcatctctctaatggaaatatttgtgtaaatgtgctacaatccaagttgaagtatacttccattatgcatcttctcagtggacgtttattgagagcctatgatgtggcagacattgttctaataaaggacacattagagcataccagagaaaaatcttacatgaaaacagtaaacagtaagaaatacatgaacaagattattccagagggtgatgggtgctgtacagaaaataaaccgagaaggtataaaagatattgactaaggataaattagattgtgtagaacaggagctctagaaagacctcaccaaggaagtaaccttggagcgagtgatgagacagcaggaaccaccacgccaataccttgggacaggacattccacagagatgcagagacaaggttggcttagcccaggcatggaagaaaggccaggggcacaaagatttggtataagaagttccagaggaagacaaagacaggtagtaaatcacgtaagagtccacgggctatagtaaaaagcttgaagttgatgtacatatttttgattttgaaacagtaaaaaattaggggaaaatatttcaacattcatcagtaggggaatggttaaatacattactgaatataatcatcttgtaaagtactgtctagacatgaaaaaaatagaaagctctgtatttactgacatggaagaatgtgaatcatgctattaaatgaaaaagcacattacagaacaatacacttacaaaatacaatatcaaaatatacatatacacacagataaaggtgaaattcagaggtggggatgtgggactttgactttttactttatacacttttgtgtgatttttttaaattatggatttattttattattgataaaatatacaaaggttacaatactcctgattgtaaaaaaaaatgcttagtaaagtatatttagaaaacagggaaattggaacagtttttagccaaagaaaatcccacactacatattggcaaaaaaaaaaaaaaaagagagagagagagagagggagaagagagatttctattctaaaaaatgccttagggcttgtagtttcttataacttctgtgactacctatggcgtataagtattagattgtattctacaaattgacagcccaggatcatattcctggttgctttgttttttacacaaatatctttatctgaactctggctcattctggaaatgtaagcctctcctccctcttcctgattccccttcacaccccacaaccatgtcagttgtgcagccattttctggtttaaatttcagaacacatgagagggcccagctcgccgcatgttaagataatcctttaaaggttgctgtctggccatgtgagcttgcaagataaggcaccgagcgtggggctttcttcatttgaaagagtattttgagaaccttctttgatgtttgaagccccttttcttctgacctcccacttgccaagtagatactttctttctttcttttattttatttattttatgtttttatttgggggacattttactcccagggtagttatagtcaaaaggaagaaaagtttggaatttcttctgtttgaacaccactgtgtaattggaaggcgcaagtctccacgacactgatgacaactcaaaaaagctcaaattaaggaaaagtccagttgaaaggtcaaggtatggaaacagtacagataattatttgggtattattttaaagagcaatgcattggtgaaatattcatcatgattgtttttggatacattgaataccagttatttatattcttgaatcataccagtgaatgtctgtgtagatggtattatcaagtctggggtttgattttacccctcttacaaatcagtgagcctgctactgtatcaggctgctggtggaagacgtgagtcttggggccaaaggcaaagggctttattacacagtgctcagcagtgcagcagcttgtgtgcagggaatgaagcaattggctcagagggaacttactcatgggtggatttgcatcacagccggtgaatactgagctgggactactgttatagcaagccgcatgcaagccttttgtctaggggaagaccttgccttatctctttaggttaccagttgcataagcaaccctgagtaatagtctgttaaaagcgggcaggaccttttgatcttggcaagtccagcaagatgtatagaagggagagaggcccaaagaggactgtatctcccagtgagttgtaattttatatcacaatatctaatagcatataatcctgttaacgtagtcatgcatattacatatgcatttcaaataatctttttaaaaggtttttgttaactgaaggcataatagtaacaatgatgatgtctttgcttcatttttaaaaagaacaagaaataatttggaaaaagtagcatagaaatgaaagaagaaaaatgtcacttttcttgtgctgtcaagtttggatttatagttcactatgattaagtatggaagaataaatagttttcaaatagacatatttattagctactaaatggaggtatattaaatacaggtacctcgatggcatatgggtttgtatagaaaaatacatttttttcctacagaaagggggttagtagtaacacagaacttcagattcaacatagaaaccaaattgaattacagcagcatcaaaagattttcaaagaggggctttggacaatgtactttgaattgcctctgcagaacactaatacagacacgtgcctgggcaggggcatggagggccaagtgaagctaaccctctttcccataactcaagtcaggggagacaattttttttttttttttttttttttttgtttgagaaggagtctcgctctgtcacccaggctggagtgcagtggtgtgatcttggctcactgcaagctttgcctcctgggttcatgccattctcctgcctcagcctcccgagtagctgtgactacaggcgcccaccacgacgcctggctaattttttgtatttttattagagacaggatttcaccgtgttagtcaggatggtctcgatctcctgacctcgtgatccacccgcctcagcctcccaaagcgttgagattacaggcgtgagccactgcgcctggccaggggaaacaatttttatagaatagtgttttttattgtgaaggataactttttgtgaaataaagtttttttctgggctagaggaggcttcctcacgtaccctggccaccctgagtgcttgttcacagttggttttggaagggaatagcagaaagagcaagatgaatgtgagtccgcctcttcctactattgtttcttaatatttacaatgtctcccatgttagtctgatttatctaacagaattttctgctatcctaaaaggaagaaaaataaaatagagaaacaggtgtaattttcagtagaaatttatttttaatattattcaattttaattcaaataggattatttttcagttattttacacggcccttatttttgaaagttaaacttgtgtccgccacctcccacccccaaatatctcagtgcattactattacttttttaaagataggtaactaagcattatactattttgagttgtagaaatgtggtttatatgttccaaatagctaaattctaaaattgacaggatacaacttatcaaacatacaaaacatatattttacatggtagagaaaaataacgaaaacattcttgagatgatttgatttttcataaattaaatgaagacttgagtcaatttataaattggcaagtagaagtaacagcatgttctttgaggccttataatttatctactgaaccataattttataaatgagtatccttttgatacttccctttggaacactgcatatttggcaaaatgtttgggatcttttacttttaaacatttaacacacacggtgtagaatgtgagcaattcattgttgaaaatctgagagctgcacagtccctatttttcataattcatatgcatgccttccttcttttcggggtggaattgtaattgccagctttggttatttggtacttttttcttagtaggtcttcagctgtttctccaagaatgttatagttaatggcctcaaggtttgctttgatatcaggctgcacgtatttacagagactggaagtacgtgagcagataggactcttggcatattaacactataattcctttagtggaaaaacttagacttaatttgagcagaacatcaaacctatgcacagcacacttgcatcactgctgcaaaaatcaatgtggctttttttataaataaagaataattaaaagacaagccagaaaatttctctccattttctctctcttggtctgtcggtattagtctgctccagctactataaaagaaagtctcatagactgggcacttaaacgcacatgtttagttctctgagttctggaggctggaacgttcaagatcaaggtgattgctggtgaggcctctcttcctggcctgcagagagatgccttcttgctgtgttctcacacagagtagaaagctcactctttttttttcatcttatcaagctttccaatcctggcttgtgacctcatcctcgtgacctcatctaaccctaatcaccttcgaaaggccctacctccaaatacgatcacattgggggttaggggttcaacatatgaattttttgagaaacacactttggtccataaccctttctctctctctctcttttcccctaatgagccactccaaatgcaaagcgaacttctgaagtaaaaatgtagccatctgaacttgactgatgtttacaagttatggtttcctgggtggtgaagggcctgtcttcccagctaagaagatggattgtcttgtttcacagccagcatcaaaggcactggatgggatgccaaagtttctgatgagaacatttcacttaagataaaaggcacttctaaaatcctggaactctgttttgctttgttttgtttttcatttaaattttcagtaaagatcaaagctgtcaaaaatttaattcaaaaactcatcattcatccatgttgtctctcaaaggccagttcctttatccttttaccatttttaatcagtatgtctcatgcccagcacaatcagaggtgcagacccactaactccatcgctaagcagaggtcttagtaagcactggcccgtggtgtgccacggaaacatagaagtaatgagaaaggtggagcgagagcctcacaaggatcttaccattgtcggtgtttcattgtcggtgtttacttttgacttcttgacctctgtgaaagatttctggtttacatgattttgtgtttgtaggttttttgttttttggtttttttgtttgttttttaaagaacaaatgacttattttatgtgcttatttttaatatttaaaaaagaagaaaagatgtctgactgtatcgagagtagacaggttttataggaaatatctaaaaacaactacataaaggttaccattcttttgaaaggaaagcctttctccttcaaaatccattaatttgtttagcacttattttaaaaggaaactgaataaatgcaaatgttaggggatgtatatgtgaatgtggcattgtccaagtaaacgattcacagaaaaattaggaattgttgaagaacaccttactgcagttcaaaaaagtgagtgccatggattaaataacaaatattaaaaaataaatggaccgtaagttgcactattagaaagaacactttctgtttgtgttatttttaaaggggtgcgataagacagaggaaacaaatttttccacttattgtgttccaggtaccacacacccacacccgcacccacacccacacccacccacacacacacacatatgtatatataaattatattttgccgtattttagtaagtgagaacataaaagtgagaatttgaaaaattataaaatattgtatgacatgggacgagaactgagacagtttagaaaacattttgaagaataaaacaataatataagccaattataaaagattttcggataaaaatgtgttgtatggcatatttgttctgtagaatattgatgggttctttgaagagaggatgccacagtgaagtagtttagccaacccttaactaaacatgtatctttactgtaggaattttccaattccattaagaggcaaacgtctattctctatataataatcatgattcttgaacgtatttgaccactgaacaatatttttccttgcagcagatcaagaagtgggtattaagacattttgggaaatactggtttagctgcctcaaatgcaggaaataagatcacttataaccatgtttatgtttttttttttttaattttaaaaggtatatttagttatagcaaagaaaaaggaatacttaactcatggttttgttctgttttgagaaaatactgaggagatttcattagcaaattaactcttgtagtaaaaaagattattggttaaaagtcaagtgattgaattttttcctgattccattactaagactttggacaaggtgagttaacatctgtcagccccattttccacctctgtaaaatgaattggccatgttagggctctcaaaactcaactttctcaacattcatggagctaaattctacctaattttccgaatgtccttgacaaaccaaatctagataagttaatttattcaatcagtcacctcccaaatatttatttacctggtggttttcctctgctgtggcacttccaagtacatctgttcctatggggctgatgggctggggaattgggagagatgatttaggaaacaagtaaacagatatgtgaagaaagtgatttcatatatatatatatatatttttttttttttttttttttgccacagtgtgtcactgtgtcacccaggatggtgtgcagtagcacaatctcggctcactgcaacctccacctcccaggttcaaatgattctcctgactcagtctcctcagtatctgggattgcaggcagccgccaccacacccagctaatttttttatttttagtagataggaggtttcaccatgttggccaggcttatctccaactcctgacttcaagtgatccacccgccttggcctcccaaagtgctgggattacaggcgtgagctgctctgcctggcctaaacaaggtgatttctgatagtgagcactactttggagaaaaaaatctaaaatgataagatagggataggagacactttatgatatgctgcactctagatttagagaactgaatgcatccactcaagagtttttaatgatctttaatagttatctactagaactatttcaaaattggtgaagtatatttttatcatgaatgtggcattgtcttaaagataagaaaccaaaaataagttcttttatgaacagagaaatgtaaatttgtagcatttaaacgtttacagtcagaaatgctttcattaaacaatttaattattattttaaaaagaaggaatagaaataccttaaatctgtaaataatgctaagattttcaaacagtaaaataccaagcttgattgaattagattgtggaaatattttgattgcttacaaggctgaaaagaaccatgccaggtaactttcagtatggcaagtgaaaaataaagatttcgaaaaatattccaaactgtttattaaaattcataaactaacttttgtctgtaattttaggattacagacaaattgtacatacagaaaagttgcacaaagattttccctatttctcccccaacacacacatacactttcctctgttattaacacatcttgcatttgtgtgttacatttgttaaattggtgaagcaatattgatacgttattattaactacagtccatagcttccattaagcttcattctttgtgttgtacattctgtaggttttgacaaatatctaatggcatgtatccaccgttataacgtcatgcagaagagcaccactaccctaaacataccctgtactccacgtactcatctctccctccttcccctgaacctgtggcaatcactgatctttcactgcttctatatatagttttgctttttccaaatatcttttagttagagccagaaagtatatagcctttacagacagactttcacttagcaatatgtatttaaatttccttcatatctattggtgactcaataattctttttattgctgcataatattctattgtaaggataaaccagagtttgttcattcacctgctgatgcattaatggacatcttgtttccaggtattgtccagatatgaataaagtgtgattgctggattgcatggtaaatctgcttagttttgtaagaaactgccaaactatcttccaaactggtcataacgttttgcattcccaccaggaaggaatgagagttctttttgctccacattctcactgacattggctgttttcagtgttctgaattttagccatcaactaggtgggcagtactatctaattttgttttatttctgaattccataatgacatatgatggtgagcatcttttaatatgcttacttgccagctgtatttatttatttctttatttttcctttggtaggatgtctgcttaactcttttgaccatttaaaaatgggtcccttacttatgtgtttctgagttgcaagacttctttgtatatcttggatactactcctttatcagatatatattttgtgaatattttctctctgattgtgactcggcttttcattctctggagagtgtcttttgcagagcagaagtctttaattttaatgaagccctgcctatcaattatttctttcatggattgtgcctttggtgttacatgtaaaaaatcaccagcaaacccaaggtcatctagatgatcttatttgttatcttctccatgttttatagttttgcattttatattgaagtttatggcgcatttttagttgatttttgttaaggatgtaaactgtaatgatttattctattttttgcatgtggatggctatttgttccagcatcattttttgaaaagatgattatttctccattctattgcctttgcctctttgtcaaagatcagttgactgtatttgtgtggatctatttctgggatctccattgatttgtttattgtctatcttatctttttttttttttttttttttttactaataatcacactttattactgtgacattatagtaagcattaaagtcgggtggtaccaatgatatttgttctccttcagtgttgtgtaggcttttctgggtcttcttcttctctatataagctttagaatcagtttgttgatatcctcaaaataactttatgtgattttaatatttaatttaaactttgttttgaccaagcaaaaaaaaatgtattatatattagattatttcttaaatattgtagtctactatggtagtctggggcccatgtggccaccttacagcaatcatagtgaaacacagtctcttatcgtggtgtaaaccatggtattatattcatggaacactgtagtcatttcttgtcctgaaagaggaaatgatggccctggaagaaatgggatgggggtggggggacggctatgaaagcagcaaggggcacaatttaggaccacagagtagaaagattagcatctttcagttagagaagattaaagctgcaagaacattttctgctttctacattacgtagtcaatttattgaatagcgtaatcctgctaagtagtagtgaccaagggtagaagatatttaattacagaaatctacatttaagggagataataaaggtcacgttggtggttttggccttgtctctgaatgtggcaggtgtaaagtgcccacagtgccctcacacagaatgtctgagatagccctgtatactggaggaccaacaagactcctgtataagtactccctgtatcaacctatagatggatctgctgggcacttgtatgcagaatcttcatttcttttgatgagttgatctttgctcttaataatttacatttgagtttttgtcaaatagatcagttaaggtaaacctaattaatcctttaccttgtaaacaaattctgcttcacaggagacttccgaagacagagacattgttcctgacttggtttcctttatgtcactcagggtccctgagatgaatgttagaatccatcaaaattgaccatgttttttttttttaatttggttcaaaaggaaatacccagtttgtcctgagtaatttcttttttcatctccaacccactttcctgcttacttttgccttttattcatgctgaagaaatgggcttttcttcttgctactacagctgcagttaggtaaatggtttttgtttcagtacttaatatgggaagtaattggtgaaggactttagagagacagtatgtattgtttagaggtatttcctgactcctcccagaaatcatatatgtgtgtgtgtatatatatctacacaaaatgaaaaactaaattgttatatatatatagatagatagatagatagattacagatggtgttaaaatttaagttccagttctcatatcttgccttttaaaaagtctcttaattaaatagataatgtgagatctatgttttagatctctagcctagaacataattatgttctagatctaaaacataattatgttttagatctctagcctagaacataatttcaaacacctataattaaattgtaaataaagtccaatttctctattatcaatataacatgaaactatatattattctctaattctatgaaaacagaaaaatataataaatatttttaaagagaaattcaaacctgtagactgtcttataggctttgtatttctaatctcccacagagcctgacatagttccatttaatgagtatttctgttgttgatgtatattcttttaagtgagagtaacaatattatttttttaattgactgaggaaaagtaaattgtgtttgcatttaaaaaaaaacctttcatatgatattttaagagtctccaaataaggataactgcataaataaactagtaatttatttgcttagttcaaaaatataaaagctaatacgtcaacttattcaattaatggtttgctgatggttgatagacacagtaaagacaaataatacaaagagtaaaacatctgaggatagcactgtccagaggaagattcctcagtataacgaagggaggaaggaactgaaaatatatatatctgttaaattatgtaataaatgtatgctttattgcttcattggaaatataattggccatagtagagatttgccatacacttactctagcttttccagctgctaattagaggtggaaatgccatcttatttttatgcatacttcatatgatccatatttttaaagtatactttaaaaagtacattttgtgattctggccaaaatagagactataatctgttatattactcatttagagttagaaggtctgatctccccattgttcctgataagtacaaatgattttaatattggtaatcaagagactgctttgtgacgcaattttattctcatcttgtcttcttaaaagttgccactatctgcctcatgagcaattgtgagtaaatggtcagaggatttatgcttttgccttgctattttaaataccgaggtatgataacaaccactctcttagttttcttttattgttaagtttttaaaaatcaaggaatggtgtgtataccttcctcttcggttgagaatggtccagagaatgtcacaggaatacataacattgcagaggcaaatttccatatgctgcagaattaaattctagacaaatacacccatttcatatgaagagataaaggaaactagtttggttatattcggatagtcaaagaaacttgtggaacttataacgataaaataataatataactgcaatcatcataaaagctatggagaattgcatgcttaagttgtaagtgtgcagtttgtccctacttctagcagatttgcatattaaaaactgtacattctttgctagccaatatgtgctagcaaatactgacactacagacacataaaattggtcaatccccacattagatttatatggaatttcacagatgaggacactacaacttaagtaatacatgctcaaaatcaagtaggctgtggggtttcaatatcagtctacctaattctaatgtctggactctttctattatatcatgccactttccaaaaattccaggaactatgtacaaggtaaactacatagttgattaatccaatagttaatttttgcagattgtgtattattcatgtctctatattgtcttacctttaatattcttcaaaaaattaagtatacatatgtgaatatgaatttttttaaaaatttattcatatacgtatacttagtttttaaaatttaacattttagcatttaacatttattttatgtacataatatataatagctaaatagcatttaatatatgtgaaagaatagctgctgaaatgcttagcactcaatttcattttttttttttagcagttccagtaatttttgtgctgcctattcgagagaaagataaaaattagatttggttattgcttatgtattttctgctaaccgtccactcttaccctaggtagcttagagccaactctaatggtgtgactttcattgcttaaggggatggaaataaaagcagaacttggaaaatatgggaagctgactaaatcaacctgccacacgatgaggttgagagcatggtggcattggcctgctaccaccacttagtgagaacttctaaaaacatttgcagtggacattggtgtgtgaaaaacttctcattcaacatactagtaaagataatcaaaataaaatacagcattgaaaattataggaaagttctatttctgtttactcattaggaaataaggaacccacatttttgttttaaagtaagcacgctgcattcagtccccatctattcatcttatctacttaaagtttaaattatgccattataggtgccatgtaaatttggggaaaaatggatacttttaagatgtgtaatcaaatctagaaaatgaggtgtctagctttctattgctagaattataatactctctctgtcctttctcgatgcttccattactaagcaagtactaattagagaagagcaatggaaaagaaaataattagacgtgagatgaagatatcttttacaggaatgtgactgttagattttaacctgcttcactatttatctgttaatccatgcccttcagggtgatgccattgctttcccctgagtgattgttactgaaagtctctctcctcccatattagagtttttcataatcaagatggccccaggatgcgcagtcacactgacctgaccagattttttgccacgtagattatcttttctaaaacagcgctttggattaagagacgctgaactcaacagtcttcagcagtctataaaagataaatggttcagaaagtttgacacacagccttttctgttgtatgcttaagtaaaggcagtcctgcggtttgactcaccttgttctttgtgacaacctgccgtaatctgccttttctgcttcatagactacgtgaagcacagtgataaaaagtagttctggttctcagggccccctggtgggatgacctgggtgcagagatcttccagatattgccaaccataggaattcactgggagtgcttcagggagacctacggtgctgctgtttgtgaagtccatgtctcaaatccttttgaaccccgctgtcaatattactgagctctgtgtcccctgctcagtctgtctttcatttgtatctgacccggtagggtatgttagaataagtagcactctggtgtccggagggggtggctcaaaagcttgctggtgtctacctttggcatttaatgttaagtacacttatctactcaaaggtggtaggaaaactaccttgtttttataccacaggaaaaaaactctagcagaaaagttacatatattttaataaacacacacccatacacacacacacacaaacacacacaaaaacctcagggtatatacattttgactggattctttcatccattacaatcattttgagattcatctatgttacagtgtattttgcaagtgccttcctttttattgctgaatattatttcattgcataaatatatactacagtttgtttatctgttctgacatttgggtttaaataggttttgacgagtacatgtaaagctggacatttgtatacagttctttgtgtagtcatgtgcttttttttgcctcttgtgcaaatacttccctgcgaaatgtcctggtcccaaagaaaatggcaatctcttctccaaagtagttgtaccattttccatttagaccagaaacatagatgaattctagttgttttatattcttgacaacacttggtttggtctaccttttaattaaaaggtattcaatttgacaggtgtgtagtagtatctcattgtggtcttaatttgcattttcctaatagaaagtaatgctgggcatcttctcaggtacttatttgccatctatatgtcttctttgctgcagtgtccattcaaatcttttgcccatttttttattgggttgttttcttcattttccactttttattgggttgttttattttttatttttatttttggaaacgtagactcgctctgtggcccaggccggagtacagtggcaggatcatggatcactgcagactcaacctccttaggctcaagtgatcctcccatctcagcctcctgaagagatgggactacaggcacatgccaccttgcttggatttttattatttttttattttttatagagtcagggtctcgctctgttgcccaggatggtgagttgttttcttaccattgagttctgcatgtgctacattacagacataagtcctctttatcagatatataacttgcaaatgctttatccaagttcgtgacttgtcttttctatattttaatagtatatttcacaagcagaaagtcttaaatttaacacatttaatttgtaactttgctcttttttttggtcatgctttggggatcttagctaaaaagtgttttcttaacccaaggtcataaaggaattattttgttttcttctagaagttatatagttttaggttttaaatttaagactatgatcaattgtgtgttaattttgtatatgatgtaaagcagaaatcaaagttcattttttgcatatcaatctctaattgctacagtatggtattttgaaaagactattcattctgcactgaatagcctctgctcctttatcaagatcagttgtcaacatgtttgtgtctgtttctggagtcttctgttctattgatctatttgtctgtatctgtaccaataacgtactcttttttacggtagcttgattagttctaaaaatttagtagtgttctctaactttgttttagatattccaggtcatttgtgttactctataaaatttagaatcactttgtcagtttctaaaataaataaataaagcctgttgtgattttgattaggattgcaatgaatctatagatgaatttggagagtattgatattttgacaacactgagtcttctaacctgtaacataacatacttcatttacttgaggctactttatttcctctcagtggtgttttgttttgggttttcaatgtctcttctgtttctttctgttgtttggtcagatgttttcctgttttatatttttttaaatgatgtggtaaatggtagtgttaacgttttaatttccaacagtttgttgctagtatgtagaaatacaattaattttgtatattgagcttattctcttccaacttggctaaactcacttagtacttctggtaggagttcccataggattttcacatagaaactatgccatctttgaaggaatacagtttttcttcttctttcccagcctcgatgtcttttgtttatctggagttcttaatttggaattattgcattgactaaaacctccagtacaatgttgaatagaactgataagagcagacatcctcactgtgttcctccttttaaggggaaagccttcagtcttttaccgtcaactataaagttagctgtaggtcctccatagattctctttatcagggcaaggaagtttacttctcttcccgttttgcatcacctctcattattggaatgtactctacttgatcataatgtactttttaaaatacagtgttgaatttcatttgtgaaaaatgttaattttttatctgtttctgaggaatgtaatattttatctggttttggtattatggcagtggtggcttcattgagttggaaagtagtcattcattttttgtttgtttatttgtttgtttgagacagaatttcactctcttgcccaggttggagtgcagtggcgcgatctcagctcactgcaacctctgcttcctgggttccagcgattctcctgcctctgccccctcatgtagctgggatttcaggcgcatgccaacacgcctggctaatttttgtatttttagtagagatggtttcaccatattggccaggctggtcttgaactcctgacctcaagtgatccacccacctcagcctcacaaagtgctaggattacaggcgtgagccaccgtgccaggccagtcattcctttttaattttctgctaaagtttgtgtagattcatgtaatttttaccctaaatatttgctagaattcactgaaaggtttttacaaaatcagtctcttcaacaaattctattcaggttattatctcttttttattgactgactatgtctttcaaagaatttgtccatttcatccaagtagtcaaatttactggtataaaattgtccataatctgtctttatatttttaatatctgcacaatctgtagtgatgtaacctttgcctttgctgatgttataatttatgtcttctctctctgcctacatgtttatctattgtactatctcaactaatttgctgttgatttttagaatttctgtctctctttctctctctctttttcttttttgctttttacttcagtattgggtaaattacagtctgtagaccaaatttagctctgtttttgtaaggccttgcatctaagaatgatttttacttttttaaagggttgtaaaaagaaataataagaatatgcaacaaaaccataggagacttacaaagatgacaatatttattgtctgacactttacagaaaaaatttgtccatccctgttttatataattgattttgactctgatttactttctttggatttaatttgttcttctttatttagttttatattatagaaaatgtcattgatttgagatcttcttttctaatataggtatttattgcattcctcgtcagtttctgttgaccacaatatctggatatcagatattgtgacttatgctttgtggattattagatatgtttttttctcttctacagatatttttggtcgttgttctgggaccgagttaagttacttggaaatagttttatccttccaggtcacgttgttggttgttaggcagaactggaataagggtcagtctaggacttactgttgcccaccagaggccggccactctgtgtattctactcaatgctctgtgaaccagcaaggttttcagtttcactggtgggtataagaggcactgttccttaccctcgtgggtccctgacactgttatctctaatccttttgggtaggttctttttagttttctcacatgcataaacttgaacaagtctttgcagatctctgacactctgtctctgagcacctctcaccaatattttgtcctgtgaaatttggaggccatcgtctccctcaactctcagctttatctcctcactttagccttaggccccagcctggaaacgctctcaaggcagtaagttggagtaatgttaagactcaccttatttgtttctgtctcttagggattgttagttttcaatgcttgatagccagtatcttcaaaaccattgtttcaagtaaaataattaccaaaaaaatatgaatgagcttgaagctctttttaaaagaagaaatagatcatttcagcaatgtaatgggagatttctaaatctatttgtctcagtgaaataagagggagccatagataaaatttaagcaataaaattaacaaatgctatataaaaatatatatatacataagtactatatctgacacaaatttataaatgtgatattcatcacaaataatacattctctttattcaaacacacatatttaagtcataaagcaagaatcatcaaagccaaagattaatttcttatacccagtattctttgaatacaatgaaatgaagttagaaaacttaactaggtcaacccatattgaaaattaagaaaacctcttaagtaactaatggatcaaagaagaaatcataaaggaaattagatggtattattaatgtagaaaaatacaaaataaaaaaaaaattctatatactaaaaattgatccttttacatgtgtggctataatggctcttcaaggaaaattggtgagctttatttttttttcatcagaaaggaacagaggctgaaaattagtgaactaagcatccaacataagatgtcagaaaaaagacaacagaaagaacctaaagaaaatggataaataaaataataaaaataattccagacatcaacaaagaaaaaaataaaataaatataataaatataatagtttgctctttaaaaagcaaagaaaatagatacacatctcacaagactgatcaagaaaaaaatactaaagacacaaataatattaggaataaaaaagtacacttaacaaatataaatctgaaattaaaatgttgttaaaggatgatatgactacaaatactaggaaagcaaatttagaaatagatatagacacatatatagatatatgtatatatccatagatatatatctcacaaccctctaggatttattccagatatacctgtctggagtaacatgaaatagtcatgttatgtaaacataaataatcaataatgtaatttaccatattgacagattaaaacaattacatgatctcagtagatgctgaaaaagtattttaaaaaatttctcatgcagtcatggttaaaaacgtatcaaactagaaatagaggactttttttttcttgtttttgggggtgggggtatgggggcaaggtctcactctgtcacccaggctagagtacagtggcacaattgcagcacactgcagcctcggcctcctgggctcctgtgatcttcccaccatagcctcccagggagctgggactacaggcatgcaccatcacacctggctagctttttttttttttttttgtagagacagatttttcactatgttgcccaggctggtctcgaactcctgggcacaagcaattcatccacctttgcctcccaaagtgctgagattacaggtgtgagccactgaacccagccaaattttcattaatctaatagaaaaagatctatttaaaaactgtggaaaatacggcaaaaatgctcaaaggttatttttaagattgggaaaaaacacgattatattcattatgaccagtccactgaaaggaatatggctagtaaaagaacaaaagttattgtctttgttttatgttgttacaacagaataccacagcctgggtaatttacaaagaaaagagttcatttggctcatagttctgaaggctggaatgtcctagaacgtggcaatggtatctggtcaggacctttctcctgtgtcataacatggcagagggcaagagcatgccagctaagatctcctttctcttcttataaagccaccagtctcattatgagggccccactctgatggccttatctaatcttaattacctcccaaaggccccacctccaaataccatcaacatacgaatttggggattaagtttccaacatatgaaatttgagggacacattcaaaacatagcaagtttcaaggttggaaagtaagaacctatcattattcatagctaatgtgactacaaagctcaaaagaatataacgataagtcatataaattcataagagaatgtataactttgctgaataaaaattcagcatactgaaatcaattgcatttctgtatgctaacaacaggcagaagatgtgatttttctaagctaccatttaaaattgcgtgcatcaaaaatatgctgaaccttggaataatctaacaaaagatttatacggcctttgtgaataacttgacaaaactattgctagaggttaagtaaagcctcagtaaatggaaagatattccttgaattacgaacaatcagttcttttgttaatcattgcacaatgtattcagtcaccacaatatgcaatcagcaggttgactcattatctttacttgaaaaggatgcatacttgttgctattatcagtttgtttccctgcactcaagagtacatgatgggtttcttaatttattttgcttcaagcctacccttgggcagctttctgtgtgtagccaacatctgccctgattcttaaaatgaccattttcaatgctagacagaaagtgccgtgatttatctatgttttctcagtagtgaacagggaaaagaacagctgatatgtgaggagcaattgtgttgtattcggagttattccaggcgtggtcttcacctcttcacatctggaatgggaggccctggggcctggggatgaactcaggggagtaagagagcacagaaagaggtttctgaacagcttccttggttgtttgtggagctgcggtcttgtcctaggaaaattctttaccttttggtgcacactttgtttctgtatagtgattatacagtatacaggactgattaccatggaagcattttgttaaagcacagtgaaatccttacctcttctgcctatcacgtttgagcaactgcttcaacccaaaccaaaagaaactcacttctttcctgcttgtgtgtgaactcactgtattcaggttccctggggcacatccattttcaaacctgcagcccagaaaggaatggagcctggatagaaagccagtgacaggtactatctgtcaagtccacattttcagagccactgttagtagtagtggggctgcttcaaggacagggcgaaatatatctgagtatctcggtgggcagggggcatcataaagacgccatttttctctcaaccttcagaatggacaagggccaggccagacctccctgacccagctgtgagggcagtgatgggggtgaccttggtttggctcagttgctctagtttccagcacgtaacaccccttggcatcatttcagctaataactaatatcatatgctgctatatgattcatagaatcacatctgttaaaagtaaatttacattaggaattaaaataatgcctccaaatcaccacagtgtgatagtttgctaagtgaaaattgacttataaaaggaaggtaaaacagggaatctctgattgcagagtctctgtagacgatttgagattgcacattgaagaccatatgtttctatgcgaatgtgacatgtatctaatattgggagcatttccagaaaatgctgtgcaatatgctcttcaaaaaaaccaagtcttaacttggtattagactgagccacgtttatacactgcagtttgtggattgtatgcacatgggaatggcacctcaaaacaaactttccttttagactgttaactccatttgtgagccaacagcagatggctgaactggcacagaaattcttttccgcatagctctgtcatcactgtggtaaaggtgccagagagggagtgaccacagaccacgtttcttagggttttctaatatattaaataactttcctttttttctattgctcatgggtgaaatctctacaaaagtatttcataagtaacgtttttgtatatgttggttttagcagaagctttcttatcttgcaacattagaaatcatgtaggtttcctaaaattttaactgtttaaattttgcatatcttgcattattattttacttctataatccctgtcttctacacttgtgagcatgcttgcacacatacacatacacacacacaccccttccatgaaaatgaatgtacagaaacaacttgtgccttatacttactaaatgcatattcagaaagttaaatgttgtttgatcctatgtaagtacacttaaaaaaaccccatctagtctcagatatccaatatacttcacctgatccaccactagtgccaccatgtagtctaccattatacttcctactcttttcttattactgtttctgggaaaccaggatagcaatgcaacttgctgttcctaggggagggtaagagctatggctactgctgtagtagcaaacaacaaccacacgggatggctaaggctttattccacagacccagtcatggcttctgcaaagccagaaaggggtggagaatgtgaggtgcgtctagaacctagccttaatataaaggtattatcattttaaaaatattaacaaataatcccttgatcccaaggttaacagtcttatacctgtgttatttaaacttctcatttattgcatcttttttcaagttgatgtcaggaataaagcatactaatcaggaagacaaaaatgtaataagcagatatttcttctgatgagaaatatttatttagcattgcagacagtatataacaggttttcctattgtttttctaaaacaaactcgacttctacttgtcaacattaagctcttcctaatggttatttacatcaatccttggctttcatggatacttttttttaaagtgccacaagagagaaacctaggaataagattttatgaaaggagcaacctggactcttttttcctaccatcatattttgtgtttgcttggaaaataaaactaagcaaagatttctgtaatcagtagataagtatatcacgttagggattagaagccaaaggtaatcattaataatattttttaaaatcatcaccatgattgggcttgacaaggaggaaaatcactctagtttctatgtctgtgtcatgcggcaaatgacaacacaagagcttagagaagccgtgccttaaatctgccttagagtcactgaggagtaagtaaatgattcttccctccctagcacactgcatggtgcatagtagacacttaattatttgtcgtgtcaattaatcaatgagtcaaaatcccaggtccaccacttacttactatgtaaactttggcaagtgacctgacttcttaatgattagtccttttcaccctataatatttatcataatagcacctcattaagttattaagaaggtgatatgagataatatatgtaaactacttcacatcgtgcctggtgctaattcacagatcaatagcttattcagggtcttattaaacaccaacgttgttttgttttgttttgaaagtattatctgcacttctcacttactcgtggaaaaactatattgcaatcatgtagagtgaaagttgaagggaaacgttggccataatcagatgtgcttaaatatatgacagaaactgagttcagcatcacttgcatgatttgaaatattcttgcctctacttttgccactttctaccaaataggttgacacagaactaaagaacaaggccaagttagttattcacaaagaggatttagcaataattcaaacttaaatatgtataccgatggaagagccatgcaagagtcactataccaattagtgaggtttcaaaaaaaactatttcattaaaaagcaaaccctctacaatgttaatttaatgaatacctagatttagaagaacatttgactttgaatggccgaagtgacaccaggagtttttttttttttaatacattaggttgtggtatacatgtacagaacaggcaggtttgttacataggtatacacatgccatggtggtttcctgcacccatcaatccatcatctacattaggtatttctcctaatgctatccactcccatccccccaccccctgacaggccccagtgtgtgttggtcccctccctgtatccatgtgttctcatttttcaactcccacttatgagtgggaacatgcagtgtttggttttctgtgcctgtgttagtttgctgagaatgatggtttccaccttcatccatgtccctgcaaaggacatgaactcatccttttttatagctgcatagtattccacagtgtatatgtgccacattttcttaatccagtctatcattgatggccatttgggtttgttccaagtctttgctattgtgaacagtgccacaataaacatacatgtgcatgtgtctttatagtagaatgatttataatcctttgggtatatacccagtaatgggattgctgggtcaaatggtatttctgattctggatccttgaggaatcaccaaactgtcttccacaatggttgaactaatttacactcccaccaatagtgtaaaagtgtttctatttctccacatcctctgcagcatctgttgtttcctgactttttaatgatccccattctaactggcatgagatggtatctcactgtggttttgatttgcatttctctaatgaccagtgatgatgagctttttttcatatgtttcttggccgcataaatgtcttgagaagtgtctgttcatatcctttgcccactttttgatgtttttttttcccttgtaaatttgtttaagttccctgtagattctgaatattagcccttgtcagatagatagattgcaaaaattttctcccattctttaggttgcctgttgactctgaggatagtttcttttgctgagcaaagctctttagtttaattagatcccatttgtcaagtttggcttttgttgccatttcttttggtgttttagtcatgacgtctttgccgatgcttatgtcctgaaaggtattgcctaggttttcttctggggtttttatgattttaggtcttaacgtttaggtcttgagttaatttttgtataagatgtaaggaaagggtccagtttcagttttctgcatatggctagccagttttcccaacaccgtttattaaatagggaatcctttccccatttcttgtttttgtcaggtttgtcaaggatcagatgtttgtagatgcgtggtgttatttctgagtcctctgttctgttccattggtctatatatctgttttggtaccagttccatgctgttttgacaccaggagattttttacaagtgattttgtaccacagaactacacagttaattttcagaagcaatactctattagatatctgccagttttctacagggaaatgtctagacattggtattcaggaagaatttcattatggtttgactatatattttttattcacaaacctttaagaagttcacttttttcatccaattttcagaacaatgaattaaactttagaataaggttggataaatacttatcaaggcagaatcctattcaagtgttatatccaatttacttgaaatagagaaactgagtaattgggacaaaatgcatagaattagagagcttttctgattttcttggttctcacgaaataaaattgcaaaaatcagagactactttttttttttttaatttatttttttattgataattcttgggtgtttctcacagagggggatttggcagggtcatgggacaatagtggagggaaggtcagcagataaacaagtgaacaaaggtctctggttttcctaggcagaggaccctgcggccttccgcagtgtttgtgtccctgattacttgagattagggattggtgatgactcttaacgagcatgctgccttcaagcatctgtttaacaaagcacatcttgcaccgcccttaatccattcaaccctgagtggacacagcacatgtttcagagagcacagggttgggggtaaggtcacagatcaacaggatcccaaggcagaagaatttttcttagtgcagaacaaaatgaaaagtctcccatgtctacttctttctacacagacacggcaaccatccgatttctcaatcttttcccacccttcccccctttctattccacaaagccaccattgtcatcatggcccattctcaatgagctgttgggtacacctcccagacggggtggtggccaggcagaggggctcctcacttcccagtaggggcggccgggcagaggcgcccctcacctcccggacggggcggctggccgggcggggggctgacccccccacctccctcccggacggggcggctggccgggcagaggggctcctcacttcccagtaggggccgccgggcagaggcgcccctcacctcccggacggggcggctggccgggcggggggctgacccccccacctccctcccggacggggcggctggccgggcgggggctgacccccccacctccctcccagacggcgcggctggccgggcggggggctgacccccccacctccctcccggacggggcggctggccgggcggggggctgacccccaccacctccctcccggacggggtggctgccgggcggagacgctcctcacttcccagatggggtggctgccgggcggagaggctcctcacttctcagacggggcggctgccgggcggaggggctcctcacttctcagacggggcggctgccggtcggaggggctcctcacttctcagacggggcggctgccgggcggaggggctcctcacttctcagacggggtggttgccgggcagagggtctcctcacttctcagacagggtggccgggcagagacgctcctcacctcccagacggggtcgcggccgggcagaggcgctcctcacatcccagatggggcggcggggcagaggcgctccccacatctcagacgatgggcggccgggcagagacgctcctcacttcctagatgtgatggtggccgggaagaggcgctcctcacttcctagatgggatggcggccgggcggagacgctcctcactttccagactgggcagccgggcagaggggctcctcacatcccagacaatgggcggccaggcagagacactcctcacttcccagacagggtggcggccgggcagaggctgcaatctcggcactttgggaggccaaggcaggcggctgggaggtgtaggttgtagtgagccgagatcacgccactgcactccagcctgggcaccattgagcactgagtgaaggagactccgtctgcaatcccggcacctcgggaggccgaggctggcggatcactcgcggttaggggctggagaccggcccggccaacacagcaaaaccccgtctccaccaaaaccagtcaggcatggcggcgcgtgcctgcagtagcaggcactcggcaggctgaggcaggagaatcaggcagggaggttgcagtgagccgagatggcagcagtacagtccagcttcggctccgcatgagagggagaccgtggaaagagagggagaccgtagggagagggagagggagagggagagaacactctttttcagagactacttcttttagatttacctattagccttatcatctcctgctgtggttataattgtacatttgtctctcctggagatggtaagaaccttgaagtcaggagcaaatgcttcttctccttctgtctcccgggccactgtcctagtacagagttatttatcaaagttaaatctctacattctatgcatgttccaaacttatcggaaagttaatttttagatttatcctcttaaaactttaaagatatttaaagatgcatttataatatgttataatgaaatattgtgtattatgtaacattaataatgtatttttatggcaatattttgctattagaagtagtttgttacttgtaatactctcacattttcttaaaatatcctataatcccattccatttaacatcagtctcttcagcgtacttttgtattcatctgtttcatttttcctggttttctttccattcctatgtctctttcataaatgactgccgagtgattagcttctgttattagacccaggtgtcctcacagcccgtatggggccaaggaggaatgatgatggatcgagacctgctgatcctgcagctgccagcgagactgagaggctccacgggaaatgctgcatattttccatgttgaccaggagctgcagagccaccagccctctctctgtgttctcaaatccctcacactttacttacaactgattaagtctgaaaataacttggattatctattacgtgctaatgtagtgacattcatcacacatttttataaacaagtgcattcatctaaagaatgggtccaaatgtgttgaactctgagaaaagatgaggcatcgtctagttacctattctgttaaaggtgaaactttttaaatatttatgcaaatattaaaacaatttcaaataccttggttatgtgaggatgggggaggtgagataacttttcttaactgttattttgggttgtgttttataatagaaatatttggttatttgaaatcctcttgcttaattaggcagattcatactaaatggttcaacaggttgcatctataatcttgtggctaaaagtggttattttcaagtcaatatttggggttcctttttagagatgagagtttactaattcaatatttgtagtcacaagatacataagagtcatgtttaaacagtactgtgtgctttagaaataatcactgaaatcacaagttgttcttctaattacacctctgaccgagtccttagcagtctcaactggacagccagaaaatccagggatatccttatctgagagtagatatgttctcccccagtgatgaaaacaattcagtgccttcacaatggccagagcactgcttctcacatttttgggtctcttggactcaccagtacctttgaaagtggctgatttgttgagctgtcctctatggttaggaatttagtatccctgagattaggccaaccacctcaagccttttgtagatgtagtaaagtctaatgaactttatggaaagtattctgatgtggagattaatttgtctttgtgttgttgagaataagtgttgagctagttaggcaacctgcagcacctgcgtcccgctcacatgcaatctcaaatcatcaatcgaaatcgtgtgacagacagtcttgatgagatggcaggcatcaatcattttcagatttttgacacatacttttattccttccttgtgcagagaattagcattatggtgtgaatctctgtcagttcagtacttggcagttggcactgtcatgtgccgcagatgtgtggctttaagttttaaaattgtaaagtgtggatacggtgctctccattacccagacattcccctgaggcttccagagagaggaggtatcgttgtagctgtaacatagactgaaattggcattgagagtgtgacatctttctagtgaaaaagaagaagaggtgaagatagagtaatatgaacattttatacttgtatacattgtatacattttatacttgtatacatattctgttgagttttatgaaaacacctgattagataagtggaaaaatgacaaacagtcttcagaaagtgttatggaaacctctcatactcctgtttgctgctctggtatttcacagatggagcccaactattccattgtccttgctgcccttgcttaccctgtagaggttctttagcatcacgcattccagtgtgagatgggccgcactgctcagagaaagccaaggtgtgtggcagaatcactgtaattacttgaatctagttgcccttaagtgagaccaatcctccccagtttacccaggacgtttcctgtttcagcacttaaagtctcaagtcccagggcccctctctttgctggaagagttggccaccctcgcttcactcggcatggacttaccagttgtgtagccctctacctctgaaggaatggcaggcctggccttgaactgtgtagaagggtgaggagaagaaggcattatcaaaatcactggtgagcgataaaataggagaaataagagcagtttgatgtaattattatatattaagtttattacattcaaaaagtcaacttcttttaaagaatttaatctcactctgagtatgttgttggcataaacatattgctttttaagaaaatggtggtgatttaacaaaaggtatatttagaaaaaatgaactctggtattgttacaggcacaccctcagagatactacaggttagattccagaagaccacggtaaaacaaatatagcaagaaagtgcaacccatgagtgttttggtttcccgctgcatttaaaagttatgtttacactgtaatgtagtctattaattatgcgatagcattatgtctcaaaaccaacctacaggtcaggtgcagtggcccatgcctgtagtcccagcactttgggaggccgaggcaggcagatcacctgaggtcaggagttcaagaccaccctgcctaacctagcgaaaccccatctctactaaaaatacaacaattaaaaaaaaaaaagaaaaagaaaaaaagtagccaaacgtggtgccgtgtacctataatcacaggtactcgggaggctgaggcaggaaaatcgcttgaacccaggaggcggaggttacagtgagctaagatcaggccactgcactccagcctggaggacagagcaagactcttgtctcaaaaacaaaaacaaaatcatccataagaaacaactcttcatccattcaagtaatgagattgcagcaatttggtcacatcttcaggctccacttctagttcttgttctcttgttatttttaccacatctgcagtgacttcctccactgaggagtaagtcattgaaagatggaatccaaatcttctaattcctgttcatattgatattttgacctcttcccatgaatcatgaatgttgttagagcacctaggatgaggaatcctttccagaaggttttcaaagatctttgccaagctccataagaagactcaatatctgggacagctatagccttatgaaatatacttcttaaataataagacttgcaagttaaaattgctccttaatccatgggatgcagaatggatgttgagtcagtaggcataaaaacaaaattaatctccttgtgtatctttcgggtgaccagttgtattgtcaataagcagtaatattctgagctggagttctcaacagtgcacttaaaatattcggtaaaacacactgtaaacagatgtgctggcatataggctgtttttccatttatagagcatggccacagaaatttcagcatgatgggccctaggattttaatggaaatgagcattggctttaaaccagctgcatttgcccctaacaagataatcagcctgtccttggaagttttgaagccatgcattgacttttcctctctagctatgaaagtcccagatggcatcttgcaataaaaggctgttttctctacactgaatatctgttgtttggtgtatccaatcttagctagatgctctggataacttgctgcagcttctacagcagcatttgttgcttcacctcgcatttttacatgatggagacagtttctttccttaatcctcatgaaccaacctctgctagcttcaaccttgtcttttacagcttcctgacctctctcagccttcgtagaattgaagggagttggggccttgctttagattaggctttggctttagggaatgttgtggctgtttcgatcttgtatccagataactcagactttctccatatcagcaatatggctgtttgctttcgtttcgtttgtgtgttcactggagtagcacttttcattgccttcatgaagttttcttagcattcacaacttgactaacttgttggtacagccaacctggtgcaaagcctgtcttggctttcaacgtgccttcctcactgagctttatcatttctagctttgatttaaagtgagagacatgcaactctgcctttcgcttgaacatttagatgccgtcgtagcattattaattggtctaatacagtatagttgcgtctcaggctatagggaggcacacctgaggagaaagacagagacagtgtctaacaggcagttggcgtatcagtcggaacacatgtaacatttataagtttgctgttttatataggcatggttggtggtgccccaaaactagacgatatttatgtcagtgatcgtggatcatacatcacaataacagatataatgatagtggaaaagtttgaaatattatatgaattaccaaaatgtgatgcagagacatgaagtgagcacatggctgttggcaaaatgtctcctgtggacttgcttgatgcacggtcgccataaaccttcaatttgttaaaaaatgcagtatcttcaaagcacaacaacttgaagcacaatgacaagaggtgtgcctgcatgtgcactctagcctgagggacagtgagaccctgtttcaaaaaaaaaaaaaaaaagattttaatgtggcattttatttgctttattttttataaaaagagagtagcagagaaagagtaacttgtcccttttcacatcaagaatatatgggtctctttctctagttaaaattcaaaataggaaaaagtatagtaacagggcaaaatatttctttaaactatggaaataaagtccccttaatattatctcaaaatatctgtttggaaggttagtgaagattctgctactggtctttcaaatagcagcatgtagagccctgtgcagggtaaaatatttggagagcaaattttagaaggaaaaaatttcatagaaataatagttggaaggaaaaaacctccccttggcataatggccttcatgaagctgtgtgtggggcagtggaagtgttggtggtggtgctattggatggaactgtagtaggtgacaagcaggtgtgggttgggggctgtcgtggatgttggtgctgtctgggccctgcctgccagtgtctcatgtggagggacaccattcacacagtgcgattccaagatttgctattggttatttattatgataaatttctgggataaagaagccatgtaacttcatatgacaaaatcagtaattcacagcaattttccaacagatggatataaagtagaattagggtgcctttttccaatttttcatgaagggccatatgggctagtgatggcatgggtttatactgatacgataatttaccaatccaagggagcaggaatggcagaaataatttatgtgcgtcctaaaggagaggaggattgaggctttacttagggcaggaggtataaacctggatgcctacagggctcaggagagagaggggcgcaggccaggttgtgtgctgtgttgacactgctcctggagaacttatcttcattcacatggagaaataaaacctttctgcaggggaagctgctgcttgtctctcactggttttggccctatggatatatagtctcagagttgtcttccagtttttcaagaggaattaataatttggaattgtatgtgaaatcttgtatgtgaaattttggagaaatgacttcgttttgtaatgcaacatgttagccaaagaaaccacatgcctggattaattctggttgagctgagccagcatttgtaacctttaaagagcagatggcagagttcttgggaaggaagagtaggggtgacattttaactacataggtcacaagactggcattttgcaagaaattgatcaatacttattgaatgaacaaatatctgaatacatcccactaaaagtcattaaagttttgactttattggttaacatgcattctcaaaaatggtggaggaagctacaaggggaacacatattccatactgagttgcagtgtcagagacaataaccccaccgctacggaggtctcagtcagcaagaaagaaaatgccaggtcaatcagacacgtactatggcttttaggaaaactggcctccacatttctagaaaaggcagggtctagatcctctgaaggaatttgatttaaggttctggaagaataaattccaactatttactgacatgtgatgatactcagaaagaaaaatggggtgatatctaacaaaaccaatttaggtggtgtccaccaagctcacattttgaaaggggaagtacaaatgctgaagaaatgacaagtaaccaaggataagtaggaagaaagatgggaagctgtaaaaatgttttcatagagcagaagaaaggaatgagctacagtttatgttgtttacagcatgaaagaatgaagggatggatacataaatgaaatgatgaagcgggcatattttattgtcctgtgtacttttctgagacctgaaaggaaagttaaacccactgtttaggattgatggttgatatggtttggctctgtgtctccacccaaatctcctgttaaattgtaattcccattgctggaggaggggcctggttgggagcgattgaattatggcggggcacagatcatccttgtgcttcttgtgatagaattctcctggcattttttttttttttttaatagagatggggtttcaccacgttggccaggctggccttgaattccagacctcaagtgatcggcctgccttggcctcccaaagtgctgggattacaggtgtgagccagtgtgccctgcctaaaattatttctaaaatcgtaatagagtgatggaaaacctgaaacgatatatctgggcatcaacactgtgtcttctcttgatgtgtttgtaagtgaaggacccctggggtctgtattgcagtcactcacctgcctcccacccactcagtggctttaggtgggctgttgaatgcctccacaacacgagttcctgatgtgtcaagtgggatcaacacccttgcttaggctgtgaaggtgagtgtgtcagtgaagcagctggcactttcacacatgcaccttcttcatagcctttcataggacagcagagtaacagggggatttgtaacttccagaacttcacttaaatacaatggcacagttgaagtagaaggaaatctctagtggcatgtgaaagcactacctgtttagtttctttttgtttcagacattttccatctgcttgtacaaaacacagaaggaatgcatagcagacttggttctgagcttgcaggaacaacggatgccctgagtgacagactcaatatctagaattcagtttcagcctttatagttggaattatgcgctgaaccaacaggaggatatataacagaaacaaaggtgaagctgtttgctttcttttataaaaagctactgcacaaataccagatagaataaaattttttattgctcagaacttatgtacatgtataaagaaggtcccctttccacagcccatttgggcctggagtctgcagtttcagaagataccaccatactatgccgcttcccaagacagcaccaagaaaaaatgcagagaccccacatcacatcagcaatgtgcttataaaccatggaaaagagcataattatagaggcacatgataagcactggaaatatgagaagagacatctttttcaaaagacctgacttgctctttaggacaccagaggacagaacttggattgatagatgaaaggtatagaggaccagatttctttcctgaggggaactttctaagacgtagagctattcattgataggatggactgccttgtaagatggcaaagttcttgctgttggaaagccttaagaagaaatcggatgttgacttgctgtgatgttgtagattggataccgtttctgataggccgacaagatgatccctcagtgttttccaacttttgttttctctgatccaggttagtttacctccattatcttggctatattgacatagatttccaagtacttaaattacctttctgtggttttacaggatttattttattctaccaaaacatatataaaatgtacaaaattattgagtttttttatttttttattttttggcttcctttgaaatttagagatcctgttactctagaattctttctagagtagggcttcgagcaaaagtttgttcttagttcccctttatattcctctcaaaaataaacaaaggaacagtacatgaagataaatttcatgcataaaattaatgtactgcaaatgctgaaaatctccttgacagagaaaaaccatcaccaaggccagacctgatgctcaggaggtaggaacttgcttacggagtcccttccaacccggtactgctgcaacggttgttaaacatttttgacatctctccttaggaccctgtagtgctaaaaggagccatcgatatggaaggctttggagctggagagtgaggctctctgtgcgtatatgcccactggctatcggagctaccaccttccacgtccactgcttttgagggtccagaccttggctcaaggactgctgggtcccccgtgctgcacccgctcttccgtcctcattttcactcacacactgcatttatatggctggagctgttctacccttaagaaaatcaaacccatgatgttggattatgtctgtgcaattatttagttattttgtctacaataaaagagttagccattatatttaggaagttaaaaactggcagattttatagaagtacccgaacacatacagatacgcacttatatatataaatgagggaatgccattttaccaaatattggcattttggttcaggaccttaatattcttggtcctaacacctggaggcaatgtgatttgttgtgtttagaacatggaatgaactagagaagaagagaaactccagccatgtagcaggggccctagcaccacctggtaccacccccctgctctctggcccaggaaccgggcatgaccattggctgccttctgtgcttggaggcacacctaccttggcagccgctcgctcctcctccatccagtccattctcctcatccctggagcctgttttaattgttccttcttctctgaagcttcaccaaggcttggttcctctttccaggaggagctgagggctttaatatcagagctgccatttcttcctttattcgtttgtcctgctgctagctcagcacttataagatacgtctgcacggccctttatttaccggtctcttttctcccgtagatagggagacctttgaaggaaggagctgtttcttattcacccatctttgtaagttctaatacacattcgttgttcagtaaatgcttttgaattactgtgaaggaaaggcagaaatgactgtgttcacagaacaagcagggcttctcacgtgtgcttgttttgctgttttttgtttgttcgtttttttgagacggaatctcactctgttgccaggctgcagtgcagtggtgcgatctcggctcgctgcagcctctgtctcctgtctcctgggttcaagtgattctcctgcctcagcctcctgagtagctaggactacaggtgtgcaccaccatgcccattaactttttgtatttttagtagagacggggtatcaccatgttggccaggatggtcttgatctcttgactttgtgacccgcctgccttggcctctcaaaatgctgggattccacgcgtcagccaccgcacccgacctagtggtgctgtttgaggaacaatttcttttttcacgtgggaacgttgagggccttgcagtgtggccagcgtcgcttgccctgcccacgtaaatgcccatgcccatcttggatctccgtctgtgatccaagcccgcagacctgtttgtagaccattgagaaacgctggggaagactctggtgattctctcagacagagctccattatgcttcttcgtgttcccttggcccatccacccagtagaaagataagaccttggagaccatgagcttctccttgacaggaaacacttccaaaaatcataacggtctgatctccgaaaaaaactttccattcatgttatgcacgctcagagatgaccaaaacctaacattgaaactgtagagaaaaccattgtcaaggacctaacattttcaaaacctaacattgaaaactgtagagaagaccattgtcaaggacctaacattttcaaaacctaacattgaaactgtagagaaaaccattgtcaaggacctaacattttcaaaacctaacattgaaactgtagagaaaaccgtcgtcaaggacctcacattttcaaaacctaacattgaaactgtagagaagaccattgtcaaggacctcacattttttaagaaatgaattttcagtaaatcttctttcttggattttgtgaagtccaaagaaaatcagattgctcatgtcttttttcaaaaaacaaaaataaaaaataaaacacaacaaaactttccatcataagcaaaaaagaacttatgctgcaggattaagtgattgacacgataagtaatactgagtggatggaaaatcaccgtagtcacaatataactcacacctcatatatttttctctcctgatcaatattcagcatagaaatggcactcattttccatgttcagagagaagaaaaggaagaaaacgaaagcatatgaaggttagattggaagggcggtatttcctgttagatgagcattgtttaaatcctggagtttgttaggtcataaaataatagaatgctttaaacatggaaatattattcatagcagataaatagtattgaaaagaatgcaaggaaaagaatctgtgataatagggtagagttagagaaaaattttgatgtaaattattctttaaaaaaatgtaggaattgtgtagtcacatgattttaaaccataactcctctctttacttaggatgatattcattgtcagttgttgttttcataaaccccaagcaagtcagtacattgattcattgcatattgcatagaaaactatttaaatctatgctagtgttattttcttcctaagttcagtaaattagtgttgtgacagatatgtggcactgtagctttttcaattctgagattggtttttaatctatgatgcaaaccttgggcagttcaggggagtatcattgatttatgaatctcttctgcctcagtgtttaacaaagcttgtttgattttaatgggcaaaaagaaaactcttcttaagtaagatgtttctaatctcttgaagtattagtaccagagaccccaggcaaaagcaattctcaaaagctctctaggaggtagttttatatgagattatagcacatctaatattgtgcaaatattaaagaggtttaaaactcttaaattcattgattttttttcatcctaaggcaaatgataaaagtgcaaacatactgctttaggataagcctgtgggtaaatgtatcatgcaaaatatttacattaaaatgctgcatgacttaattttgcctgacttataatccctgggaacgctgaatatcatttcttcaaaaattctttctactttatgattcgtgtatttaatttgtcttctaacataactattatttttgtcttaatttgttgtaacttcaacaatagaggacatcaaaggatgcaagcttccttttgcttctaagcttcgtctcctccctactcagcattcattcagaggattagaatgtgaatgttaggattttacaagttattcatcctgcagtaaaggaatttggactccttctatgagcggcctctgatttgctggcttatgttttactgagctctgattggctattatgtgtgccgtcaccattagacatgaccacggatgtttgcaaagatctccattgctttacagtctctaagaataaggttttcaacaaatttataaaatgtatacaatttgtttgacttactctttttcaaatatgactctttacctaaagaaaataatattttaaactgttacaaagtcacttctaaagggcataaaacttgcaaaataataacttgtaagttggcaataatgatgctaataatttcccctaaatagacatatgtacgttaaaaatatctactaacatgtatgttgtgtaaaatgaatgtgaaattcaggaagcttgttgggctgagctttcggggaagctgcaggactgtgctgcagacttagtttgtaggtctcaccagtagcattccactgtcctgctggattacagactgggcttccccatcttgttgtggtagagcctctgtagaccctgggaacatagaaaagagatgtctgaggcagcgttcccaatcctttgaggttaggtcactagtgagccattgacatttttatagtaaattgaggctgtttccgtcgagatgagttgaaaaatggtacaaagagttttaaattttacccaagactaagaaaagaagtgcagaggaaacgaggatagtcaatagcacagagctcttaagaaagcatttggcaaccctaaatcccagaatcgataacttgtgttaaccagccaaatggagtgttacagaagaaaagctgtttgtctggctctctttacattcaaagagcttaaattgagagcctgaagtcttccaggagctgtggcatgagggctctagcactaataaagttgttgaaaacatttccttctgaaatcagtcatttaattttaaaataatgttattacttgtgtatttatggatttttttttccaaattaaaatatcctcgttctgcttagttcttaatgccagtttttttaaattaaattactgggaaatcacccagtggattaaagcaacagtagtaattttgttttgttttgttttgttttacatcagatgcaaaagttgaattagtcatactcactagtttaggacacaatattgccattggttcatgtgagacatttttgtcattttatttttatttttattcttccccttcatgccgatacacattccagtacatatacatgtacacatatacacttacacatagatacgtacacatatacacacatatttgtcattgtgaaatagaggccattttaattgtatataaggatcaatatttttactattttatatatactagagtttatagtgtgtgtgcaagttgtgaagcagaattatgaactgagcacctgtggaccccctgcgcacctgtggaccccctgtgccagtgcttagcaaagcattactgatactgttcaagatttccagtatctccttgtctacctgtattctaatgcatttactttacccctacaaataattttgggttaatttgggtttcttttcatgtggatttattgaggcataatcaacatacaataaactgcatgtatctggcatataaatgtttgtgaattttagtgtctttgtatacctcagtaccatcaccacagtaacgacagtaaacacagaaattccccaagaagttctctgtgctgctttgcggcaccttccccactctttcccagcctcaagaagctgctaatctgcttcctgccactctagattagtttgcattgtctataatgtacttacatggaataatatagaatgcactccttactctggcctgttttattaaacataattattttaaaattttttcatgttgctggtatatttaatgtgataaaaacaaatgatcaggtaagtgggtaaacactgtggtaaatctacacactagaaagttgcacacctgtatacaggtgtgtagacttaccacagtatttgcccatttacctgttgattgacatttgtttttatcacatttttggctattgcactgttataaataaagttactctgaatattgtgtactaattattgaatagacatatgctttcatttctaggagtagaatagcttagtcatatgatcagcttatgtctcaattgtaaaaatcaccaaaatcttttccaaactgattaccattttatgttcccagaagcggtgcatgggagtttcagttattcccaaccttcaccagtatttggtatgattagcctttttaattttagacattctgataggtttgtagtagtatctcattgtggttttattttgcgtttccctaatgactaaaaatgttgcacatcttttcatgcttatttgccactcaagtattttctttgatgaagtgtttgtttaaatctttttcttagtattttcaatatgattgtttgctttcttactgagtttgaaaatttttatatatatcctagatacaagaatatatcatatatcaaatatgtgatttgcaagatattctctcaatatttggctttttaaaaaaatctttaaatttgaagtctttaattttttttattttgacagtcaaaataaatgaagtcttttatagatttttatagatttttgtattattatctaagaaattcttgtctaagcaaagattataaagattttctcttatgtttttttctataagtggtttttcaaattttcagttttagattttacatttattggtgagatccatttcaagttcattttttttttattatactttaagttttagggtacatgtgcacattgtgcaggttagttacatatgtatatgtatacatgtgccatgctggtgtgctgcacccactaactcgtcatctagcattaggtatatctcccagtgctatccctcccccctccccccaccccacaacagtccccagagtgtgatattcccctgcctgtgtccatgtgatctcattgttcaattcccacctatgagtgagaatatgcggtgtttggtttttcattcttgtgatagtttactgagaatgatgatttccaatttcatccatgtccctacaaaggacatgaactcatcattttttatggctgcatagtattccatggtatatatgtgtcacattttcttaatccagtctatcattgttggacatttgggttggttccaagtctttgctattgtgaatcaagttcatttttatatatggtgcaagagatgcaagatatagaccatagttcatatttttataatggatagtcaattgttctagaaccatttgtttaaaagaccgtcctttatcaattaaattgcctttgatacttggtcaaaagctcaatggtcaacatatttttgaatttaccctcattttgttccattgatatatttatttatcttgatgtcaattccacattgtcttgatttctgtagctttacaatgagacccgaagtcagatggtgttagtcttttaattttgtactacattttcaaaatgtttttgcctgtttcaggttctctgcattgtcacatgaatcttagaattagcttgtcagtttctatcaccatcttctaagattttgattgacaatctgtagattactttggggaataatgacattttaataatgttacgtcttccaattccagagcaaatactgctccatttatttaggtctttcttctttaatatcactcagcaatgttttatacttttcagtgtacaattcacacaaactgtttgtaaatttatttttgcgtattttatatgttgatctattgtaaatggtgtttcttaattccaattttagatattttgtatattgactttataaccgagataattgttaagtttacttattagttttaatgacattttttagattctatagaaatttctatggaggcaatcaagtcatttgagaataggaattttctaatttttttctaatcttatgcattttatttttcttgacttattgcactggctatcagctccagtataatgttgagtggaagttgtaagacttaacattaaggcctcaatctcagagggaaagtagacaatctttcatcattaaatgtaatgttaactgtagattttcatagatgatctttatcaggttgagaaagttctctatttttcctaatttgctgtgggactgtataagacagacttcagatttttgtcagatgcttttattttaaaccttatgagagtattatatttctctttttcactctcttaccatggtaaattatgtttgattttcaaaggttaaatcaaacttgcattcttgggtgaaaccccattcagtcacaatgtatcgttatttgacatattgttgaattctatttgttaacatttctgtgttcttaaggaatattcattttcggttttcttttctcacaatatctttgtcttgtttttgtatcaaagtaataatggctgaaaaaaaataaattggaagtattgccttgtcttcacttttctcaagcatttgtgtagaattgcttctttttctttcttaaatgtttgatagacttcattagtgaagacatctgggcctaaaagttttcttcgtttgaggttttttaatgcagtatcagtttcttcaatagacataagtctattcaagttttcttttctctctggcttgaaatttagtaggtccttgtgtttagcctttacaggaattgtaaaatttcatctaagttgccaaatttataggtagaaaattgctcagaatattctcttatccttgtggtatctctacaatgtgtagtgttgtcacttctcttgtttctgacattggtaatttgtatcctttctctttatttcctgatcagcctgacaagacagtataatttttattgatcaacaaaaagaacaaagttgtggtttcatggtctttttcctattgttctgttttctcaaccagtgatttttcaccttgatcgttattgttttcttttttcttcttgctttgcttttcatttgctcttcattttttgtttgtgaaggtggaatgtgaagacaattggaaacttttttctgtttagtcccaaaaaattttctttgcatattgctttagctgcatcccctaaattttgttatgttatgtcttcattttcattcacttttgaattttattaatttccattttcatttcttcttttacccaaggcttgtttagaaatgcattttcattttttcaatatttcataataaactttcatttcttttgggtaatacctaagagtggaatggctagaccatatgaggtatatgattagcctttcatgaaaatgcaaaactgtttttgtagtggttatataattttaaattcccaattagcagcacaatatcctggccaattcttgaaatagtctttttatttttaacaattctaataggtgtgtagtggtgtcttaatggttttaatttgcacattcttaatggttaatgatgttgcacatgttttcatttacctatttgcttttcatatatttttttttttggtgaagtatcttgaaattttgtggggttttttttttttttggttttttttgcttgtttgatcttaaaatgcttggttttttttttttttttttttttggctttttgtatttctattacagttttaaaattccactactgggtatctacccaaaggaaaaatcattacatcaagaagatacctgcactttgtgtttattgcagcactgttcataatagcaaagatatggaatcaacctaagtgtccatcaatgaatgattggataaagaaactggcagatatacacaataaaattatatttaaccatagaaaacatggaatcatgtactttgcagcaacatgaatggaacgggaggccattatcttaagtgaaacaagtcagatagagaaagacaaatagctcattttttcacttataagtaagagctaaagaatgtgtacacatggacatggagtgtgcagtcatagacaatggacttggcagggtaagtgggtggaagtaggatgaatgatgagaagttacctaatgagtacaatgtatattatatatattattcagttatgccaaaggcatacctaactgactacctaatgttgagtgtttacattagttgaaaaataagcatgctgatgaattatttacaatgaatttttgtgtatttgtgtatgtattatgtatttacaatgcaatatcttgcaatttgtctctcttaatttcctctaatttatattaggcaaatgttagtatattagtgattggaattggatgctaaagagcaaactgtgtaagcatcccaagcctattttcatttgaaataatgtattttccttattggtttgttaggacaatttaatgagataatgaatgttacgcacttgtattgtgcctaacacacaataagcccttattggggaaaattttaagtgagttaataatttgttgttgtgtaagtaaccacatcagaacttagagcattaaaacagctattatagtttgcacatggttttgtgggtcaacaatttaggctggttgagtggttcatctttaatcaactgcagcaacggacgatgaagagaacacttccaaagggcctaattcattcttattttccacaacagtagttctcaactttctttgtgtattaatattacagatgcttgggctcctccacccccaaagattctgatctttgatgaagagaagtaccacacatttatattattttaaaagctccctagacaattctaatgtacagcagaaccaatttactagtttactttatttttccttttaaaacaaatatgtttgtttcttatttcgtaattacacactattataaaaaaatcaatttgtgacttaatcaggaaatatttcttgagtgccaaggatgaagactgtgtaaagaataaaacaaagcttacttatgaaacacacttaaaaataaccaccttaaacattttggtgtattacctaccagtcttcctacttttataacttagtgttcttttgtgacaagtgcttcgtaatacacttaaccgtttattctatatttggatttttaagtttctttttcagtatttaagtactaaatgtagcatgctgatcaatggcattgaaaagtcacctgtttgtgttttttcaattcgtttttgctttcacaaatgttatatctttggcctgcctggattgatgctatgtttataaaatgtaactttcaaatcttcataatcacgccaataagctcagtaaaagacactcaacatcactaattattagggaaatgctggtcaaaaccacagtgaagtaccacatccattaggataactattatcaaaacaacaaaaaaggaagtaaaaagttcaacagggatgtagagaaatagaaattcttgtactttgctggtgcaaccgctgtggaaatcagtatggtggttccacacaactgaaatatagatgatcacccagcaatttcatttctaggtatatacccccaaaacctgaaggcagggacttgaacagatatctgtacatcactgttcatagcagtataattcatagtagctaaatgtccatcaatgaataagtggataaataaaatgtggtatgtatgtatataacatggaggccctttgttggcttcacatctatttggcttactttttgctgctgtaggcatttttcatattctgatattattattcaccgttaaaaaggaataaaattttgatacatgctatgacatggaagaactcggaaaatattcgaagtgaaataagcagtcacacagaaatatcgtatgattccacttttatgagatactcaagtagtcaaattcctagagacagaaaatagaatagcagttaccagggcctggagaggggtaggaatcaggaagtgagtgtttaatgggtatggagttttagtttgggaaaattaaaaatttctggagttggatggtggtgttggttggacaacaatgtgaatatgcttaatgtagctgaactgtgcaactacaaatgactaaaaaggtagattatatatatattttaccatgttaaaaaaacttcagaaccaatacctgtatctatattcaattactgaactgaatgtagccagccacctcacttctccctattacatgtctgtctgtccttcccaggatatacatttacttgagacagggaaataggtgaatgggatgtatctcgaccatcctttgccttcttttcaatgctctaccctcaggagccatcacatgtcaaagttgaaataggacactatccttcaggcagactactttcagtgattgtgctctttgtagagagaatccccacgtttctccccaatcgagtgagtgtgtgagtttctgatacatctgttcccaagacatagggaaaacaaacacagtacaaacttaatttctactagcatacctcattacctgtattagtgtgttttcatgctgctaataaagacttacccaagactgggtaatttataaagcaaagaggtttaattgactcacacctccacatgcctggagaggcctcacaattatggcagaaggcaaggaggagcaaggccaggtcttacatggagacaggcaggagagcttgtgcaggggaactcacatttataaaacagtcgtatctcttgagacttattcactaccatgggaacagtatcggggaaagtgcccccatgattcaattatgtccagctggccctgcccttgatgtgagaggattattacaattcaaggtgagatttggatggggacacagccaaaccatatcattacctatatatgaaatatggaagaagtaaatggttgaggctttattggtaaatgatatgctttaatgtttgaatgaaatgacataaatttagagaatatatgtgaataagcctactctccccgttgagtagatgctcaaataatcagttttacttgaatcttaactgtttaagtccaggttcaattccctcttttttttactgcaatgaaattttgagcacccctatcaaaagtgatatggattctttgaatttctataatctttactgttttttatactaatgcagcttttacataaaagcacaggcaatatatgccaacttttcatataaatatgtcttatttcattaactatactgagatccttttaaagaaaggaatgaggtcgtattcatgttttttttccccttttgcactctctttgtaactctttaaataccccagaattggcgcttaatagtgctcatgtgtttaagggaaattatgacttcaagcctaattagcataaaacaaaaggaaaaggccccaatttctagagccaataagtctagaactgtgaatatgtattgaatccttttggtttatttaaaatttttggctgtttgtcggtggaatgtgtgcatgaaagaaagaacagtgttagcaatgataaacttagcttataaaaagtcataaattatggttttctctattatagactgtgaatctcacctatgcttaaattggtcttatttctaggaagatgtcatttttaccagaatgttcagtttagggagatattcagctgaagcagtgagtaggggcaaagccaacttcataagcctggttgtggctcaatcaaccctgttggccagtgacatgaggtatcatgactgggactctatcacatccggctgtggaatgtaacttaaaaaactagcagcctaccaaaaattcttatggagttttgctttcccatttttcatggtcctatacatcttgtatgcctaagtcacgcacatttttcctggccactgctcctcttgatttccccagctcctatcccttttgcagaactgtccagccttggaatacttctatcaccaggacatcatagaacctgacccatgcccttccagggccatctccagcattagcccattgtctgctgtctggtgtgccctctttgttagctgcctgatggccagatttactgcagcatcctttctagctctgaagaccttacagcatccaaaatgaaataggttgagtagatgcgaagtcagattctgaggaattattgaaaagtaagatactttcttggtcttgtgacatttctaagtaaatagatttggactaaatgatctttttctggctgtataattttatgaaatgaatggatggagtggaaaatgacagttggcatctgcagttttatcctgccccttctatttttaagccatttccaaaaaagacttatgtcttctaattttgcagaagtcaaacatcaaaatacgttggctaccttttttgtgggtagtgaatgcccatggagaagtaaatctggtattaacatctcctgttaattaatcattgctatgttgaaggctgcaaaatagagttgctagataaaacacaagacaaccagttaaatttgaattgcagatgaacaacaaatttgaaatgcaaatttcactgagtgctttgtatcctaagttgcctaccctggcaaccctgcttttgaggcagttggtcatagcttggttattagtactttcctacaggcggccttacaataactccttaaactttctgaatcattagcacttttcactgaattaaccgaataaagccattgactcattaggtgtttccttgccaaattaagccacttcaataactagttgcttatattgaaaaattgtaatgcagttagatcaattaccacttttagcacataggaagtcggtcgttagagttcatggctataagatgcaaaccataacaacagagaacaattatacacacttcatttgtttgtttttaaggaaggagaggcatataaggaaggaaaggattctttctaaacagatataaaaatttaacttttaaagtctgaaaaaacatttaaaaaatattattggattctgttgatcaaccaccaaaatactaattttgaaatattaccacatgaaaccctggtgatctactgtgaagacagcacaaagatcatttcgaaaaaccaattatataaatataggatgctggggaccttccttggcagtagttcctgtgaaacgcatacagattttacttgatcccatgttcagtataagacaacagtgtggcaagagtagaaaaatgtgcctgtgactttccctgcattaatcaaagcattgtcagaggaggtatagtctggaatagtgcaaagctctaaagaaatatttgttgaatgagtgaatgaactgttcgttgggttgatagtgaacatctaaaattcagtgtcagttctggacatacctttacttactaggggtgttaacacactaatgtgaccacaagaggacagtcaggggagtaagttgcctggagatgccgttccctgagagaacctagggagaattcctgggaatgagtcttcctggggatgtgcccacggtctttagctacttaggatcttgcatgtggaaatgttaaggcatctgtttaaattactctaaagggcaaaattagaacagtggtcagaagtcacaatgaagaatatcaaaaggataaacaatgtggtcattaaccaagtatgagtcacatttatacctctggataattttaatataattgatgtgttttactgcaccagctggcctctatgtagtccaacccatgtggaggtggggtgaaaaaggctgatgtttagaatcctatttctatcacttactagctatgtgaccttgtaagacattctctaagcttccctttactcaacccagaacatgggattactaatctctgtctggcagcattcttggggagaccagattaattctgcatgggaactctgtgttgtgtagtagacacacctcagagagcaagcgctacatggaaaccttctttgtgtcttgacttgggtggtggcgatatgactgtttgctacctgatgactcattgagttgttttgtgtacttctctttttgtcagttgtgcctaacaatgaaatgatttttaaaagtttcaaaaatttaaaacaaacaatagtatttacacagcagtaagatttctttgctaaaaatttgattttacatacccacgttcacagcagcattatttataatggccaaaaggtggaaacaatccaggtaatcattgatgtgtgaatggataaacaaaaatctgatgcagcggctgggcatggtggctcacgcctgtaatcccagcattttgggaggctggtgtgggtggattacctgaggtcagggatttgagaccagtctagccaacatgatgaaacccatctctactaaaaatacaaaaattagccgggcatgatggtacgcgcctgtaatcccagctacttgggaggctgagacaggagaattgcttgaacccgggaggtggaggttgcagtgagccaagatcgcaccattggattccagcctggggaacaagagcaaaactacatttcaaaaaaataaaaaaaaattgatacagtatatacatgcaacatgcaatagaatattattcggcccttgaaaacgcatgaaatcctgacacatgcagcaacaaagaccttgagacatgatgctaagtgaaataagccagttacaaaaagaaaaatactctgtgaactacctagagtagccaaattcatagagactagaaggtaaaatgttggttgctagggactgggttaagggggagattgagagttattgtgtaatgctttaatgagtatagagtttcagttttttaagatgaaatggctctggagattggctgcacaactgtggtccttagcactactgaactgtacacttagagatgggtaagatggcaaattgtatgaaatgtgtactttaccacaatttaaaaaataattttactttttacagcagaaaaaaatcattttcatttgattgcatgaataattctttctttggcctgagagcataggtcaatcaagattatttttaaggtatatatgtgatatcatctagattaaagaaaatccttcaaattatattttcttctggcatctagtgtacatttcttttaaagataatgtagatgctacaatatttaaaattaccttcactagatactcttaacctgaatgttctaaactccaggagttctagagatgtacttcaagggaaatccttgaatcttctgaaattttatgcaaaatgctgtggcatgtgtgtgtgcacagcttttcgaaaagataatccatagcttttatccgatccacaaaggctttatgacctctacaagatcaggatcaagaaccacttatgtaaatgaacttccacagaagcccatgagatgcttgcttcgatgtctgggaatgttagaggtgtgtgttatcccctgtcatcccacacatttctcctaacgagtaattaataatggaatgccattaacttggcagacacaggtgttgtatcgcctgggtcagccctgtgcccagggctcttcgtcagtgactggggtgatggagtagagtacatggtcaccttgcatgaggatgtcgtaaagtcagatggggcaacagaacctagctgggtaggaatgggattctaaatgctcttgacaggttggagaaatgaacagaagccagttacagtgagggcagcaaggacaagagaacagtaaaaatcagaaaggaaacaaaggccagcaagtcttatggaaagaactggtcaaggaaaagccaaatgacagtcctaaggccataaaatgaaacagtggcagaggggtgggataaaggtaaaattcttaagattgaacctgctctggcaggggagcaatactaagagaaaagacccatttgttatcttaaataattgacatctcctctgtttctttatctgccaatgagttccaagcagttatttacatgccgccttctgtttgcgaagcaagatttttgtgtgcaaacacacacatatatgcatggtgtataagtgtgtacgtgtatgcatgcacgtgtgtgtgatcaagcgtcttggttatgtgctttgttgtctgggtatctgaaacttaaaagggatagttgtgggggatgttggagatttattcaagacagaaagacagtgaaaagaaaaagaatattggaacatgaggaataattgtctcaaagaatagaaaataaatggagagagatgtactatgccctatgaccaggcaggagagaacagaccctcccttgggaaggctttctcaccctaagcactgagcagtcttaagaatatgacataataattatttatagcctggccaacacggtgaaaccctgtctctactaaaaatacaaaaaattagctgggcatggtggtacgcacctgtagtcccagctatttgggaggctgaggcaggagaatcgcttgaacccaggaggtggaggttgcagtgagccaagattgtgccactgcactcctgcctgggcgacagagcgagactctgtctcaaaaaaaaaaaaaaaaaaaggaaaaaaattattattacttaaacaagttgagattatgtgtcgttagagtaacttttattttcacctgtataatagattttacaggggagaataacttagctatgtttctgattttcagattcctcatgctttgattagacccagatcagtgaagtcattgtgagctaatgattatgagttgccaggtacaaaccatctcccaggaagcatctttcacagctatttttctttgctacaacaaatattttaacaaatctattcttatagcaagtgttttaaatctcaaagttataaatcagcaatctttcaaaccactataacaaaacttcaactgttacaggaaagttagttgcccttgttagcagagactatgaccttgttatttctttccagtcagggctttgttggaaaaagatagcctttatgattttctgttttcactatttcagttaccaagtaaaaagaacgctatggtcatcagaaaactttccttactgaatgattgtaaattttcacttaaatactgaaaagatggtatacttaatgttattaataattatgtaataatatggacactaacaaagtatttgctgtggttgtttcaaatttcattgaccctaaaggtatgtcagttgttttgaattcactagtttttaaaaattgtacataaaaccttcatgtatccagtactgtaaagtctcccattgctgcttttttttatatatatatatttttattataatttaagttctagggtacatatgcacaatgtgcaggtttgttacatatgtatacatgtgccatgttggtgtgctgcacccattaactcatcatttacattaggtatatctcctaatgctatccctccccgctccccccaccccacaattaccatgaacgtgggaacttaaacaacagaaatttcttcctttagacttctggaggtcagaatgccccaggcagaaaacaaggtgtcggcagggctgttgctcctgcaggctccagggacccattttcttgctgcaggccgcctgctttcctcagctcctgaccctgcatctggcatcctctgcttctggcatcctctgcttccgtcaccatggcacctgctaggacttcggccctctggctatggtggggaactggcctggtagaggcagggcatccaaggaagaagctattatggtattacagatgttgagaggccacctggcctggacatgagacggtggatcagacagctgcagttttggttgacatgtgacatgagggaagtatcctaagttggtggcaaaaattaagatggtttggtgggactttagctcttatctttcattactctctctttgtcttcccgtctatattctcatacagactagataaagaaaatgtggtacatatacaccattgaatactatgcagccataaaaaagaatgagatcatgtcctttgcagggacatggatggagctggaagccattatccttagcaaactaattcaggaagggaaaaccaaacacagcatgttcttacatataagtgggagctaagtcatgagaacacatgaatacatatagggaacaacacacactggggccttctggaaggcagaggatgagaggaaggagattatcaagaaaaataactaatagatacttggcttaatacctgggtgatgaagtaatctgtacagcaaaactccatgacacaagtttacttatgtaactaacatgcacatcctgcacatgtacctttgagcttaaaagttaaaaaaaatctaatctaacaattacaatgtgataatattaaaaataatttcaacagtacaactttttccatacagcttacgcacagtgtaagtagaaagatttttgctgatctgcagtgcacaatcgaaatcagctccatgtgcttattcggcaagacagctgagataaagatcccttcaccacatccaagaaggcagctgatcctatccccctggatgtcagattcaggagcatcttctggatagagttgtgattttctggctcacgcctgtaatcccagcagtttgggaggctgaggcatgcagatcacttgaggtcaggagttcgagaacagcctgaccaacatggtaaaaccccatctctactaaaaatacaaaaattagttggccatggtggcaggcacctgtgatcccagctactcgggaggctgaggcaggagaatcgcttgaacctgggagtcgtaggttgcagtgagccagctgagatcatgccactgcactccaggctgggtgacagagtgagactctgttgttgtgatttgtttttgtgagattttgagttgggatttgctacaatctctgaggaaaaggggtatcattgtcacctgcgttttaaggtcagtcatgtctctgaggacagcggctgacttctgaagccagtctctgagacacataatgtagtgcttgatctttcaagatacctgactaaattacattgtttgtttccatttttttatgtttatttccttgatttcaataaattgaaatcagagtatttgcattaaaatatcttagttgaataactatgctaggaaaaaaaaacccagaatattatcatatgactgattaggacccacggtttttctcatgtacataagtaaaaaaggtcaagcaagatgggctgccctggcaccagaaaatataatctgataaaggaccactagaagattcacttgtctttcatggggcttggctgtttacagtcagtgttttcttctgaaggaagctattttatccctacccgtacaacagatgggtactctagtatttcataaaagatgacaggaaaattacattaccacaaatggcaaaagttgggaggtatgcaataggatagtttattgggagaaaatagactaatatcaaaacagaaagaacagaagcagaaataatgaatttgcctgcatcaatctcttctttcatgacctcatcatgccggagataccgatcaatttcactacaagcaataaatattaaaatgaaattcttgagtgtcttatctaaagcttcctgacatcaattgttttcccagttttttccctgcaagcattgaatacctcttcatcaatcttttattccaacccattttgttccagtttctctcttcccacaaaaagttttttttccccttctatttttgacttttctttcttagcagagatgcatgaatattatttctttcttagcagagatgcatgaatatgccacagtggctgcatttcatcgatcaggaaataaaacgtggatttgaaaggtgtttcctgaccctgaggggctacaaacaactgagacatgtgtagtgatccctcggttcctggtagcagtgacggtgaagaaggccacgtgcctgtcaccacccatgcatttgcatcctttcttattagaaaggatcctgcataggccaggcatggccaggagaggggagtttgcaaagagcctttaatccttaaatgtcatctccacacaatgaccagcttgacaaatatttcaaaacatcttgaaagcaaatgttagggtcatcattcttgtctgtataacactcttgatctcacaatgtattaacaataaccactttttatatcgtaatagctgaaaggaacaaggttttcattttcataatcatcttcttattactagcggagaaatgtttgggagcatggatgttgttcacatctgagtttatatgaaaattattcaatgtttgcagtgccttccagatttttctgtgaaggtcatgtctccatcatttaggataatctccattgtattagcatgcaatagagcatcattaatcatgacatgtcatcaaactgtttttttccccttacattttctatagtcaaaggtatagtattttccttccaaattcagttcaggtcttccttctgtggcattttccacttccagtttcatttttcccatatatgcacatcttgtttgtaatacataatttattatgtacataatacataatttggtgcttaatttgctgcttagttatatctagttggtgttttttttttttttttttattgagacggtgtctctttgccgcccaggctggagcgcagtggcatggtctcagttcactgcaacctccacctcctgggttaaagcgattctcctgcctcagcttcctgagtagctgggattataggcgcccaccagcatgactggctaatttttgtatttttagtggagatgggatttcaccatgttggccaggctggtctcgaactcttgacctcaagtgatccacttgccttggcttcccaaattgaggggattacaggcacaagccaccacaccatcccgctagctggttttgttgttgctgtttcagatccatggtctcacaatgtcctcaggagctgaatgtgacctataggtgggtggggattggcccacagatagatagttttaaaaatacaaatcttgaatttaatgccaacattggagaactggttaattacacataaaaagcaggatttccattttcacttgagttaaacaacacacctggacacactggtgatcgtgtccatcggtagcatcagctggagtggatgtgctgggcctcagcattggcagcgtgcctgggcctttgaaacagttgctcttagctctgcctcgttggccataggcatttgaggttgtggcctaaccatgtcatttcagttttgttactagctaataaatcccttgaagtcagagattgtctaataattttcttcattctcccactgcctggcgtagtaccggacacatagtagttgctcagtaaattaatttgttcaaatacttccgttgtgtgcagctgagcatatactgagcttctcaaagagccaggggaaaacaattttcacacaattcacacaaattaaatgattaatcttcgcaactcctttttgagattcacaggggatctacagcacgtgtagggattaatttatggtgtggaaagaataacatgtaatgaaagtattcccagctgcacattcagggaagatttagatgcacaagaagtaattactcatattggaaattgccccataggggttaacaccagctgatcatttactagaaagtggcctccacagagaggggtgtctggtactctctccagccctgcagccccttagaaccatcatttcttgtgaaccagcattaccaaattacccgacaccctcagtcaggccatctctgaccattgtacatcttttgttatgtagactagggttcatttagggttacttcttgtagaattctttttctgacccatctttaattgtataagaatatttacaatatactatttgggagaaagggaacttatgaagattattttccatatatttaaaaaataatagaaataacccaattgtgtaataaggttatagaagatttggtcctaagaacttcttttttatttccattgtgaaatagtcaagggaattgagcaagaaaaagattaaaacatgtaaaagaaaagagatgatatcaacatgtcattaacatgacattaacatgtatatatgtaaaatatgtatctaaaacagatatagatactatagataggtgtatctatatgataaatgtatatatggttttagatatagaattttcagtatacttacaaatagttccaaaatcatatatattgtgacagataataatactttaaaatacaccaaaataatacttattcagcaatcaaatgctagtgacacagagacactagaagtcagagctgacaacattgatttaacaaaacttaattaggaaactaaaaaccaaaacatttttcttataagaatgtcatgcactcatagttttcttatcttcagtttatgcaaaattctagctaatatggctttttggacccatggtctaaaagcatttggaaataagagcgaagctcgttcaagaattatactctgacccagcaagaagtaaaaacaactggacattgagaaaagatcagaaacattatatgaaacatactcacaactttaaaaaaaaagcaatgataatttttttaaaaaattagaggtagaatggggaaatcacattataaacatgtcatgtttatcttcatctttctggatgtatcataatattaacttttcgaggtttggtaaaaccaagctaagtttcagtgaatagtggcctggcacttccgtttacaaagacactgagggcataattagccatgacatattggcaaacttttttttcccttttattttctatactctaagatgtagtgttttccttctaaattcagttcaagtcttccttctgcagcactttccacttctgctcccagttttatttctcccttgtgtgcaaatcttgtttgtaatacataacttggtgcttaggtatctctagttggctttgttgttccatatctgaggtctcacaatgtcctcagcagctgaatgtgacctatagatgggttgggagtggccctcagatagtttagaaataaatatcttgaattgaatgccaatatttggaaactgtttgattacatctaaaaacctggatttccattttcacttgagttaaacaacacatctgactaccctggcactcacatctggcagcagcagctggagtggaggtgctgggtcccagcattggcagcagggcctccaggtccccaggacccttgagacagttgctcttagctatttagtaatttttgtttatctggtacccttaagtctgtcttttccccatttgtgtgaaaagccagtggagtaacaaaatgttgaaaagttccccaagtcgttaaaagaggatcatatataagtgtgggggaagtatagatagatagacaggtagatggatagatagataaatggacagatggataaatagatagatagatagatagatagatagatagatagatagatagatagatagatagaactggatgagtcaagcattacattttagttatatggaaagtttttggttccaagaagtatgtttatgtgtgaaacaactttttctaatagccataggcagcagtgttaaaataaaggtaacatttttaggccagcagtggtcattaacaaagagggaaaagtttactacagtgaagtttccatttctatagtgtgtacataggagaaaaaaacagcataaataaaagatgaaaactgactatttagacgagtcatgagtcctgccaaaataataggggattgcggcaacataagagacgaccttcaatcacttaaataccaacaacccctgcaattcagaggtgaggaaaaggcctattccaaatgaattataatcacttggattacttctatttctttttttttctcccttcacagaggtaatgatatccatttgagatataattaggtttatttgtttcagtatgttttcagttataggattgtcctgcctttgttgactgaatgtatttggacctttaacatatttccaggagcaaaatctatacaaaaaattccctgcagagaaggctgcctccctcctcattcctatcctcccattgcctcctcctggccctccactacctccatccaccacttgtgttccatcaacgccatgtttccagcttactcttcctgagcttgttttcttaaagataagcaaatgttttcttattttccttctctgttaagcaaaagatagccaactatacatgtatacttttaaaaacaatgtctccttcctgtggtttacagacatcttttgtaaagtagagatgaattttgaccagtataatttgatattcttgcatagagatctttgtctaatttttttttacagcttcctaatctttattagttttaaccaatttccaatgaaaaagcatctcatcatttctagtatacccagtaggtacttcagtacatgtttgttaattaatgaatttatgaacaagaagttcatagatgcatagatgcatctcaaaggtttggattgatggagaggaattcttcttcataagtggttctgaaaggaatcgcattgaacagagatgcacagtggagcactgagaacattggcttgcctgaaacaaaagtttttgtattgccaaattgggggaatagacttgctgtcttaggtgaggcaaaaatcaaagttctttgaaaactgggtgtaagtttcaatggcaggaattaacatgataagggataaaataatatttgggcatagtacttatggaacttaacattagttgatgtaaatgctgctagattttcactatttaataactattgccattaaaatattgtggattttttttacaccatagcagaacaaatagtactgaattacctttccaaatatgagtaactagttttatgttcttttgacagtttggttatgtttccaaaagtcacgtaactgctttctctgggaagtgtgtgtgtctgtgtgtgtgtgtgtgtgtgtgtgtgtgtgtgtgtgtatgtttaaggcatataatactcacccataggcccttagcattatgataatgttcaatgaggttggtaaaagggcaccaaaataatgaactaattgaacaagaaatataaatgtggcagtgggaggtgaattagagggtaaccaagtaatgttagctttctatggctgtgtaacaacttaccacatatctagagtcttaaagagacccctgttggtgatctcaccatttctgtagctcagaagttttggcataacatagatagatgtgttctgtgtttggagtgccacaagattgaaatcaaggtgtcaataaggactgaaatctcattaggagcttggggtcattctccaagctcaggtagctgtggcagaattcaattcctatggttgtaggattgaggactccattcctcactggctcttccccggggactgtcacctgcctgcattccgtgccacagtgagtgctcccttcattttcaaagctaacaatgaacaatctgtttcttgttgaatttctctcatgattgaagtctccttcaccaggatgagctacgtctcttttaaggggtaacttgattaggttaagtctaacttaggttaatcctttcttaaagctacctatgtcttataacataacctaacaataagagtgacataccatcctattaatggattcctctcatacacaataggagggcattaaataaggttgagcatctaccttgggtccaaggtggtagatgattatcgtgctctttcaggtgtgaggttatgaaggcctttactcaagtggtagagggggaggataaaatgactaaatgcaaacacattttgaacagagttatcagtaagacttgcttatcggctggagaaatgaggaagacaggaatagtgaaaagtagttcaaaccaaatcaaaccattgattaatgcaaggacacgagaaaagaaaatgtctttgaccaggatgccaatgagtttggtttgatacaagtttagtctaacaggatatcagaatgagaatattgcgtaggtagttggaaatacatttgtgactgtagcacaaataagacctgagacctgaagagacaggtttggtgtacatcatattggagatataatcgaagcattgagaataaatatgcctttcagggaaagtgaattctgcaccccccccccgccccggccaatttatttgctgaagtttaacctccccagtgaggctgtatttagagatagggtctttaccaaggcaattcatgttaaactaggctgtaagtattgggccctaatgtaataggtctggcatgcttttaagaaaaggcagaaataccatgagagcacaaacacagagaaaaggctatgtgaggacacagcaagacaatggatatctgaagaccaacgcaggaggcctcaggagaaaccaaacgtccagatactttgattttggacttgcaatctgcagagccacgagaaaatcagtgtctgttgtctaggccgccctgtcagtagtgtttggttatggcatccctcactgactactacaaagaccaaatacagttcctaagaacagacatatatttaggaggcaagagcaggcaagtgagtgaaaggcaatcagaagtttaagaatgctgagtctgcgtctttgactatactacaaagatcagtagccttgggggttaaatggcctggaatctggtcttctctcttccatggacgcgctactttactttggcaagcctctttagctcccaaagcgcttgatgcacaaaggagaaatcatagtgcatatcttcctggtcattggaaggtttaaaaaagtttttgcatttctgtggccttttttttatgttgatatatgtgtatacaattaaacgatttcttctataaaaatcatgtataagaagtactagataaatatattatctctttttttcagaagttataaaactgtggagttctgattgcatccattaaaaaaaaatctattcttctttagtgcatgtctgtggatgtagctccaccatcagctccagtttgctattggtgtttaggtactgtcatctgtgtcctgacatgcattttattttgttaatgtataggttgaagacaaggttgttaatggttgttggtaggttgtctacaaaaagaataagtgggttacgatggatctgagtacaggttacagacctcaagctttggtgcaattctgttgcctgttagttggtcctgtgaagatgtggcagctcagtggtcttttgtctacatcctggctcttgactctttcttgagtgactgagcttgcccgataaaggttaactttagagaagtgaggtgttctaatctatgtttggttggttccaggcctcctctattaaagatgcatgtggaaaacttgaaaagtatccaggtgaaaggtttaaagaagtcaaataatttagacataaaaagaaaaaaaaaacgcagagagctgcataacattcttcagtctccattaaggagacctaaaataagcattttgcatgatcttctcttttagaaacctaaatgagctcccaaagatatttaactggcatcaagaggtggaatggataactgtaatacctttttctctgttggtctttgcaaatatgacagcttttcacatctctgaaatagtttagatggattctgatagaatgtgtttttttttttaaagaagaagaaaagccactgtgttcagaaataagtttttaaaggccgacaaaacacattgaatgtcataggcattcctattcatgtttgtattccatattttatgaagtaattgtgtatgtatagcactgttgtattatccagagtagatagtttcataaatcatttgcagctactgctctgattctataatgctactacacgtgttcagtacatttttgtatgaaaatttctgtattattaaaaaaagacagcagagaatggaaagcaaacatgagtgtaactcagcactaagtatgtggaaaaataccatgagtattttatataagtatgaaatgaataaagctgtagtgaaagctaggattttctgcatggaaacattgattcagattttatgtcattttggtctagctttactttactttacaattatgtgtaattagttatttgttacagatgtcttttgaacacctgtgtgctaagcagtaagtgtggtaggtaggaagaattcctgcaaagtggcctgcagcccactgtatggccatgaaaacacagacctatagacacacatatatataaaggaataaatatatgtatatatttatttaaaggaataaatacatatatatataaaggattaaataaagggaagtgataatgtatagtttatatatatttgcataatttaaagccaagttcacaataatgataatgaaaagttatatctaattaaatagaaatgagccccatatcttccagtgactttattcactgaagccactgaacacttgggtgcacctgggaaaaaaatagactgtttttatcgaagaagctgctcacaaagagggagaaaagaatagtgttctagtgtgcccattccaccttccacctaagggtaaaaaccagaatcttacccaccgggagagacactcaagcgtttcagattggaagtctcctctattcagccattggcctctctgcccctgtttctggcattgaatctaagtcgggagctcacagtgagccgtgtcatgggcagcgtcccaccatccagcacagtgtctctgtctgcccgaaggggctgagatgcctgatgcgtcttcgctgttaaggttggcatctgagatgtgttccagcagctctgcctccagttcacacctccttgcagctttccccaagagcaaccctttgccctgaccctgtgagcccctgtgggccatcctcccttcagcaaggccaactcctcttttcagtgcagtaggatgtggaggctctttttagctcctggaagagcgggggctggaaccaggccctcactgtcttggacacaccaggccatctcttctgctcccacatcaaggccctcagggcacatggcggggcagcacctcccagaggtccaggcttccagccctcccctcctccacctggctcagccctggctctggctttcttttcctgtgctctgagaatcttatacagctcaggatgggcacagggtcaagaaacagcttgcacctcggcagtttttccttaccattctccctctccccaagattgctgctttcatcaaggtgaaggccaagaattgtaaatatgtcctctggtgcctccatgctgacctcatggggttggggggtggggggtggtgggggggtgggagagtcactaaattagagagcatatgtcatcctgagggggaaatatcttcattagtacttcctattgtcacccttcccttcagggaaacataaccctgtaattccagggtgtgtcagttcagattccagaagaaaacagtaccctcagataggaggctgaagaaaacagttttaaaaaaaacaaagaaggatgtcaagacacctgaactattcatggtgcgaagctgttactattgttaggtctttagggacaagaggaataaatgctgttcccagagctaatgagaattggagccctagcagaagggacatctggtggatggtaaatcctagagggttgcagtccccaccggaaccagagatttcaagcaagcagggccaggaaggatggagggaagccccagtcaatttctctctctctctctctctctctcccctccgtctgtacccattgacctcctggtacctccccttgtcaaaacccaactggaggttgcaggacaagggagcccaagtgatttggcctgtgggtgtcaacctctgagggcacagaacagaatcggaaagatggaagatggatggatgtgtagttgtgtgaaaatggagaataataggacagagaatccacttctagcacccacagctataatcctgatttcacatattttgcttgttgtaactactgacatgaacatacttgtcagaatctgagacttaatatttagtgttgagagtatgatttttagctaggactgggcatggaggtgtcactggactgtaattaatgaagcaggaaggatgaagagcccacagtggtatgttgctatattgatacatttatttttagatgattcaaggaaatttattctttgtctctccttgtcctatgtggtttttaattatatttttctgaaagtgaacttaataataagaatattttttttctgttactctgagaacaaccactatagattaaatgtgttcatgttacagaatatatgaatatattttctgatggagtttagatatgaacccacaataatttctttgtgttattacactgtatgcctcctaattcatctgtccattcatgtcacatctattcttttcactcttcaaacagaagttctttcaaaatccaatcttgtagaattgtgccttttttccttctttgtgccagatgtgaaagaatgccttacatggtatcagacacaggtggatggatacccttgtgcagatggtttaattggtactttgatatatcaatattactaccaggatcttgtaacggatgccattgatgaaactgccacagttgaaaaggacccagagctattttaggtcccatgtatattcttcagcagagtgaccaataccatcacagccagctgcctttgcgaaactaagatgcttacaaaaaaaaaaaaaaagaaaagaaaaattctagaatctgattagcagagctaagcagttcctgttgtactgacatgtaggattaagctatggcttgaaattcacatgaaatcatggggattaatttcgactgggccttttctagttaaccattccagcagttaactcttggccccctttgccattaattttttccttgtagaagtatgattggacacgtcatttgcaatatgagaggcctggagatgtactttatttttcagattttattcttttttaaaaatggattagaatgatagatttggaaagctgaggtggcatggaaacgatgcttttttctagttaacagtaaatccttgggtagctgaagacattctgattattttcactttgacttttctaagtgaaattcaacatgagtttccttcccctttttaatttttgtcctcaagtaagaaaattttcttaaatacgtaaattaattggcttttttcctgctgggtataatagctgtatacatttgcaatctgagcacattttaatgtttttaaagtgcgttcatttttgctttacctcaatgtgattggcacataataatttggttggcaaaagaatggatagatagttgtggagtaagaaataagcggcatccactgcttctgtaaatgtttacttagggtccagagtgggaagtcaggcagctccgggggatttcagaagctgggttaaggagccagccagagggtccttaaagcctgcaatgctcagaaaggagatgagtgatatgagtatcagactcacataaaagcaagaagaacagagcttgtctccatcctctcctgcagtagaggctgtgctcatacccttcctggagagtgtgggcttgtcaaggcccctggctgggaggcagcgcagatagggagtgaggtactgggcgctggcatagaagggggtggggggcatagaagggggtggggggatgggcacattctgttttaaggcgactgtgggccttgacagctcttggtctttctcctccatcttttccttctttttacccatttactgtccctctcccctccttgttctcttttgctttgtttttgtttttaaattttatttaaaatgaacaaatcccagatacaaacttgctgtaattatttttacttttccaaaattgtagtttcatgggatatatctttttatttcatgtttctttgtagtggccttgggaacatccgaaaatttctgcatgggtatccactctcaattagaaagcccttcctgtattaacaatgctccttgtcacactgccatcagatggtgtccctgcctgtcaaggggcatctcctgaatttcagattctgacaactgcagtggcagccacctatgcagaagtcaaaataaactccaagggcaagcgtaggcttgtgtgtaaggccccactttgctctagaattatgaagttagtggatctgcctgctttcctgggaagtgaagagcaagagaagacagacaggaaaaatctgattgccagtgaggttcccacaactcctgtagtggggccaggtaatacttccgttttatactttgaattttgctgaaattattggacaattagttaatggcattagtcctaataggagatctaaagtcagaataagttccatttggaggggagacgcatgtgtgtgaataaattcgatctcagctggcgagggatgctgtgggtgccttacgtggtatcagaccacagggcctgtgtgtagccatgtcaggccttttgtgtaaatatagactgataaatagcaataattccatgatatcaaggcaatcgagtaaaaagtttaaaattctgtcaaaccccagtataaatggtgcacacataacaactgaactgattcattattttggccctaagtggacacagcctaaatcttcctctggtaagaaagcttggcaatctagaggaagaaagcctccatatgggtaccgagcgaccagcatttggaagagctccctgatgttgtcacgcacaagccccagcaccagcgaatgctgggaggctgcgtgcatgccgcttctcacacagattctgaaatacaacttgcctagttaatatattgttgagctgcatattggctgaacttatgtagggctgtatattaaatgtatgttccaaatgaaaagctagaggcagaggttttagctaataagtatggttactagggttagtgatcgaggaagcacaacccagatccaggtctcgttcagatcttgtcctgtgttttctgggttatcaaagtgagtgcagtatttcagtagtctctagatggaacttagtttgtgcttacacctgaatctgcattacttacatccctcttttccttttcttactcttttttctattcttttcttttatgtttttattgtattgtatttctctttttttttactcttattctattcttattctcttcttaatcttcttcagcagaaaacttaatacaataatgatgctgagcaagcacatctttaataacgtcagaacaaaaggttgtatttccttttccagttgcccaattaaatcgtgtgcaggagttaaatcattcctgcagtttcagcagggtctgtgatttttgttttactcagtcctgtgggcagttgaagtagtgaacaaagtctaaatttactaatcctggtattcaggcaagttattaatcaattccacaatttgtatttcttgctcatttcaagccacaggttcttctctgcctgacattgacattgaggaagaggtttaattagagtctctgcttctctctctctctctgtctctctcctctctctctgttcacctccttctctctctcaggccaagctctgaagaagtttgaggaagcttgaaagggtgtaggaaggaggagaatggggccaggaaacagagcttttggctcgggtacttggagcctggccaagggttccagctgattcctcagcaccgggggctttcatgaactcttagtacatttgcaccgctggaaacctcttttctgcatctctcctgcctcccaatgatgcctctctattcagccgggttgcatggccccttctgatctctcctgctgccctaaagacttgactttggcttcttgtttccagggtcctgccaccctccaggtggccctcatgtctaagccctaagacttctcccagccgggaatagtggctcatgcctgtaatcccagcactttcggaggccgaggcggacggatcacaatgtcaggagatcgagaccatcctggctaacacggtgaaaccccatctctactaaaaatacaaaaaattagccgggtgcggtggcgggcactctctgtctcccttcttcctctgtctctctctctttctgtctctccacctgcccacatctggtccttggggaaccccagtctttcccacagccctggagtacaggtccacccactgtattcacattcctcctgacagcctgctctagctcttcaggctgggaggagagccctctgtgtccccatctctgagtcatcccctggcttccaccgggcttgaggtggaggaagagcactcgaaaaagtggaggtggggccccccaatgggacagctgccctctccagggcggtgatctcccactcacccactccctctccgctgggtctccttttatgtctgtgaactggctgagtggtccgagaactcagcaagtttccacctcctccatgaatggagtacatggatttagaattccaaatctgtgttttctatattttggtggctttgtttacattttaaccctcattcttttaatcttataaattaaaacttgggcccctttgagaaatactctttcccattcgggttctttccctcttcttatcctttcatccttttcctggggatgatcagcccatagggcctcaccactgttctgcctgaagaagggaagtctaatttcctgttggcttctgtcttattggcctctactgaagtgaaactggggatgttgtggaatcaattttcttttccttccctttacatctgatgttgaagcttgttaatatcttacccaggatgctaaacatctggcttacatattttcattttttgagccagcaccctttggaaatactgttattctcagaaagtctctttgacctcctccttgcccttcatgaggtatttactgcaccccttgggtccccagcgaccacaggactctgtgcatagacactctgtggggccatacctacagtattgctgctacccagtgttggaaatcaggtttttttgtgtgctgtaggagatcccagaaagaattagggcattccattggttgctttactttcacctaatcaaagagatctgggggtttttatatccccctccccatctccatcactaccgaaagaactgatcctggtgggtctaaggaaggcagtggtgctgcttctcacccagctgctctcatccagaccccatcacacatcctgtgggtatccaccttcctccagctgattcagacttatcttcttatgggctctaggtcatcctcggctcttcccacttcgaagcttccatggagtagattcaatcctggaccattgtggctgctgtagattcaccaacatctgtgcaattccaagtctggttacttgaccctctgtttgcctgggattttttttaagtctctccttctctaaggcaatgagcctctgcctgtaggtggagcctttaaggtagaaagctacagggtacaaaagggtaatgacaaaagaaaatatatcaggtaatatattgaaatattctgctcctttatggtgttgcatctctggtgattaattgaatgtctttgaaagacggatcagtgccaaatgacagaataacttggaagaggccgggcgcagtggctcacacctgtaatcccagcactttgggaggccgaggtgggcagatcacctgaggtcaggagttggagactagcctggtcaatgtagtgaaaccttgtctctactaaaattgcaaaaattagccaggtgtggtggcaggcaactgtagtcccagttactcaggaggctgaggcaggagaatcgcttgaatgtgggaggcagaggtggcagtgaggcgagatcccgccattgcactccagcctggatgacaagagtgaaagtccgtctcagaaaaaaaaaaaaaaaaacaataataataatagtaataactaggaagatactatgaattgtatctggaagtggctgctcacttagaaaatgactcatcaggtttgctctatattagaacatcttgtttgtcttcaacgcttcatttcctgaccaaatcccaacgccaaccttttcctcttctataatggagaaaacgtctttggagattgttgtcgtagcggtgaataacctcagggtaacatgaaaggaaaagctttttaaaggtaaaaatgaaaaggggctctgttaaagccagggctttcatctttttacgggaaattctcctgtcagcttagctctcaaaaaatctttcatgtttggctcaagaatccttcttcacctgactttcgagcaggaggtgaggcatctcgaaatgtgtgggtcccatgtgtttccttgtgatccctgacaccctcccgtgaagtgctggagggatactgggttggtaatagtgatcaagggtggacgtggcaccagagggtggtggggctggaaagtggcatgattcctgcgatgtcccttcccccccatcccacccatccctcttgtgacatgctttttgcatctagtaccagagttggttcataagtgtgaataacatcaagaggcttgttccaggcaatctcttctgtagactggtacgaggcctggcagtagacgatgccaatgaactggcccaggaagagcaaagcctgaagcttaattatgaccagctgcattttagtgtccagaggtcaccatgagtttcttgccctagtttctaacatgatttatgatgataaccctccacatttctctcttctacccttgggattctcagattcatgttttatgtgcctccgtctcagcaaatgcttggctgttttcctgattctctgctatgtttaggaaaatcacccatgacatcgctcctttcttataagtacacacagttatcctactatctcagaacttcggagaacatatttaatatttaattccatgaatgctctttctaccagaagctatgaaagtgagcacttaactggctcagactagcattatgttcatttttagagttatcctatcccttttgtgattatcctgaaaagttgtcaatgtctttgccaagaaacttgcagctccttcttatgttatttccatgccagaaaatttgtattttccttctcctggactgttagggcagaactggaaaagttcaaggcagtctgcaaagaggaaattgccattaatgatttaaattagtactttcatttttttagaattaattttccatttgaaaaatagatctgttttagcttgaaaatctacggcattaatattgtcataatattactaactcagtggagaaatatacatgaggcaattaacttttggtgataaaaaattactcataaaaatcattgtctcttaatctgacatttaacatggacatttgaatatattatttgaaaaatctaacaaggaataaattatgatgttttaaatcaaagaatttaaattctattaagaaggaaaaaattctgatattttgtgttagatttatttgtatttccacaaaatgattaactcactaagaggccactcaagagtggaaaaatgacttgctcgtctgtttaagaaacttattcaatgaagtcttagtacaacagatatcttatattaaagcaaacaactatacttgacctgctgcaggggaggttagacagaagggagtttttcagcgtgtacaatccctgcatgcaaaatgagagggaatgacagtcagcctattgctgaggacaatggtcggtctgtggactggggataaagtgaaggagtcttggattcttcctctggtgctcaattctcatgctcaggacataggaggcgaataaaaatattcatgcagcacaactcagataagctgaaatgaaactttctctatttttcaactttctcacaagccctcatttccactctcagaaggaaagaaaaaaatcatactcttacttccaggtaggtcattctgtttcaatttagggacttagatatgcagtcacattcaaggttcttcctttccctttctcctgcccttgatgatcccacggctattgaaattgggagggtcaccttggtgtcttgctgccacagcagaggcagctggctatctgccctccagtaaggtacctagtccttggatgctctctccttcctcttttatgggcgttatggagtgaattgtgttcttcaaaaaatctttttttttttttgagacagtgtctcgctctgttggctgaggctagagttatctcggctcactgcaacctccatctcccaggttcaagtaattctcctgcctcagcctcctaagtagctgggattacaggtacctgccatcatgcccggctaatttttgtattttcagtagagacgggttttcatcatgttggccatggtctcgaactgctgagctcaagtgatccacctgcctcagtctcccaaagtgctgggattacaggcatgagccactatgcctggctaaaaaaaaacacctattttgaagcacctgggaatgtgaccttatttggagagatcaggtctttacagtggtaatcaagtgaaagtgtggtcattaggctgggccttaatccaatatgataagtgtccttagaaaaaggggaaaaaaagtgagacagacaagcacagaggcaggacgatgtgcaggcacaaggggaaggtggatatctacaaggaaggagagcaccctggagcaggtccttctctcccagccctcagaaggaaccagccctgccgatgccttgatttcagggtctggcctccagagctgtgagacagtgcatttctgttgtttaaacccctagtttgtggtacttgattactgccatcctaggaaacccatgtgtaggaaactacacttttgccatattccacatcctatgttgtagtaaaaccctacagaccacaacaaatctctttgtctcacatggccttaaagtgaaaaacagacttcacaatggtactgctgacctaagcttcaagagcccgtttgatcaaatgacaacaagctcatgtttctttgtcctcaaggggcttcagccttcctcagcagccaagcataggtatctgcaaatggcaagaatccttggaatgataaatgtatccgatgtttataaatggtatcatggtagaaaaatgtgagtgtttcaccatttccatgtttgtgggcttggtttaatgggtcctctgcttaggggctcatgaggctacaataaggggttggtgggggcctcggtgagggctccgtgtccttttcggagaagttcactttcttgcagctgtagaacttacgatgacttgcttcttcaagcctagcaggaacgtgaagtctctgtcacttcatgtctctgaacttgagaccccgtttcatggagctcacttgcacacttctttttagtagttcaggcccgccggggataatctcccttttgctgaacaagccagccgattacagacttgacgtatatctgaaaacccccctctccttggccctatagtgtaacctaatcacacgggtggcattcttcatagtcacagatgctgctcatagaaggcagatacacagatcagggagtgagacactcaagagctaccttagaccgctgcctactaccagcagccaaaaccagaatggatgtttttcctcttgttggctacatttaagatgaggatgaggataggatgtgggcagaagagtggctctggaccacctggcttggtatagagcccacttccaggcagggagggaaactgtaagagttaggcatattcagtgcttccgtcagtggggcttaagttcagaagaagattttagctcttgagcatgattctaatcatgaacaggattccggaataagacagaacctgaggcatttggcctgggaaatgcagtgggaaaattgtgggtcatggagccccaagcccaccccaagcatggtgaaatgtagaatccaggttccatctgctgctgggttagtcacgcctcgggtgtgaccagcctttgaaatgattggcatgggttgcccccacttagctgcgaattctacattaggcttttctctttcatttttcataatcaaagctaattttctcacattccatcccttcacaaatttctatttgtgatagctagttatttgttatcaatgtaaccctcccagttaatccttttgatttaaatagaagtcttccatggtaaataatatgaatcacaaaagaatgatgaaaatgatgggaattacattaaaatagcccttaaatccaaccttttcttatgttcataatttcattatgtccagtgatttttttgcaaggagcaaggtctctctctgttgcccgggctggagtgcagtggcatgatcatggctcactgcagcctggacctcccagactcaagcgatcctcccacctcagcctcctgagtatctggggccacaggcatgtgccaccatgcccagctgatttttatatttttttgtagagacagagttttgccatgttgtccaggctgattctgaactcctgggctcaagcaatcctcctgcctcagactcccaaactgctgggattacaggcgagaacccccatgcctggcaatgtgcagtgaatttttatagggagacatcatgtcttttcctcacagacaaatcagaattgtgatatgttcctctggaaattcatgagcttgtctatctgcctcactcaccttcctggctggaagctttcgttgcgtctcatctgtaatctgttatcatttttctgagtttcacacatctgtaccattagatgggacagcctttggagacaatagagaagaattggagggttcatcttaagtgcttccaaattctaccctttaactgctttggttatagaatgaagcaaaatttagatgtgttaattaaagtagatatctgtactcattgctgatttattcagtcaaggtaagcagttcaacgtggttttacaagatgaacctggatgcaaatccagtgatatccctttaggtaagttatgcatctctttgagctccagttttgttgtccatcatcttatttcaaggagtcgttatgaaattaaagtttggagaatgtaggtaaaatgcttgatctgtttaaacgccagctacttggccagatattttaaaaatgaaaaagaaaacaaccctcactgctaggtacttatgttcctaatgaatgccttatcatggtctttctcaaagaagaactcgatattgtcatagcaaccatccaaaccacactgtgatacaagtttcttcttacttgagagcgatctagcattttgtttttgggagcaacaaatgagaagtttgccacctctgcttatgctaatcccacatgataaattttattggagtcagtattgcatgtataatgccagtgggcttaaaagtatgaaaatgagttggaaatgttggtgaagttgtagggagtttgaagatggcctacatactatcaggaaggaggaggtggtatgtagcacaaaggaatgattgatttctgagaaagaaaacatgaagatcaaggctcacggctataaagatttaggaaaaacaaacaaacaaacaaacacaagaacatccaaaaacaagtttggaaaggctttggattcaataattagctagcaaataaacgtgataaaacctgtgccctaatgtggcattttatacatttacagctctgtttaaaaaggaagcttccagtttcaacccagtaattttagctgttgtatctgatatcattttaaaattttggctgtgcagagtaatctctagaaagtttattgacaatccaaaacctgatgatgtaaatttgattatgctgccacgctgcattttgtagtctttggttgtgtggttgaaaccataggatgtgagctcccagcttacagttgagagtttgtctctaacttgtattttgcccatctctccatctatgcccccgccgccacacatttatcaaccattttgtcgtgtatttatctgtttgttgtctgtctgtgttcactacaacttctgtgaacatgctttggcttcaaagtggcacacatctcttctagtcatacccatcagataaaaggaatcagtgtagccaaccctaaatgttaaggaatttgggaaatcaggtcatctggtgtcggggaagaggaggaaacagatttcgatgaggtgccagctgtctctgctacaatacttatttatcagtgtggtttgatgattacaaataatatgtaagatatttagtaaatatggtgcttaatacagttcttgagagttattactgatattcattcattcaacaagcacgcactatactggtttcagtgtaattgcgaagatcctactatataactccttatttccccttattttcaatgcagaaatgaataaccccatgtcatcctacatttctttatttctttgatacaacacccaataataacctacacctgctttgtcttgaaataatgcagtcatcccctaattaaaatgaagtatctgtcataaaggaggtactacccatggtgcccagatgttatgtcaagagtatatgccagaggccctctcggaaaaaaaaaaaaaaaaaaaaaaaaatctccaaaatatctgtgaagatccctgatacatgcctgctgctatagaattcgagagggaccagtaaaatgttgtataattcttgtataaaatgaaccttcactacagactgggtggcttaaataaataatatgtttattttctcacaattccaaagtcaaggtgtcagtagggttgattccttctgtggcctctctcctgggcttacagatgtcttctccgtgtaccttcacatggtctgttttctgtgtctgtctatacctgaatctcatcttaaaaggattccattcatgttagataagacccaccctaatgctgacattttaacttggttacctctgtaaaggccctatctccaaacagtcacatttgggatactgggggtttggaattcaatgtatgacttgtgaggggacacaatttagcccataacacttgtagctgtgcagcatattggcagtaaatagcaacttgtgaggttggctacatagtaactgattaactagatgaactgctagtctgtggcccagatgtatacgaatatcattctcagctgtgaatgtcttcaaacggaggacctgagttgtccaatattcttgttcattttgaaaagaaaatccagtaataaggatatttatcaaaaactgcccaaacttcaaatgtaagtcactacagtggaattgctatttataggagaactggcaaagttcaaggtcaagatgtgagatgaaataacacaatatggccgggtgcggtggctcacgcctgtaatcccagcactttgggagaccgaggcaggtggatcacctgaggttaggagtttgagaccagcctgaccaacatggagaaacctggtctctactaaaaatacaaaattagctgggcatggttgcacatgtctgtaatcccagctacttgggaggctgaggcaagagaatcacttgaacccgagaggtggacgttgcagtgagccgagattgcgccattgcactccagcctgggcaacaagagcaaaactctatctcaaaaaaaaaaaaaaaaaaaaaaaaaagaaagaaataacacaatacataaatatacccagttacccttcaaaatctctgaaattactcttacattagtggatcctgggcccatgaaagcccaagagccaagaagtagctgttttattccttctttgcatttaggctgtggttgccattcatgaagttctcagatttgtttattttactgattttattttatttacttttggctaaatatatgtttttaatttttgtgaattatatgtgtacttagtatgtttgtgctataatttgaaaattttagaatattgttcaggtaaaattaaggtgaatctggagaacacgctagtgtgtatctttatttcagatagaggacactgagcttaacacatcaagcaggggtcaggatctaatacttttaatacagtaacatttattcctgcttgtaatcccagcactttgggaagctgaggtgggtgaatcacttgaggtcaggagttcgagaccagcctggccaatatggcgaaaccctgtctctactaaaaatacaaaaattagctgggtgtgatagcgcatacctgcaatcccagctactcagacgttgaggcatgagaactgctttaatctgggaggcggaggttgcagtgagccgagatcgtgctactgcactccagcctgggcgacagagcaagactgttctaaggattttttcactctatgcttctctactttttcattgagatagttacaaaaaactcataccatttccttaatcctctcttgtcgtctcagaaggcaccagatttactggagcactcacaaagaattctaaagacataaaaccatgcatacatacaaacacacacactcacacgtacatttcagttggattgaaatatgatttccagcatctctgccattccaaaaatggacacaaatcttaggtgaaaataaaaagacttattggcataaagataataaaagttagaaagcacaaatatatttttcttttctcaaaagagaggtgagtgagtggctcccaactgttcatataaataactgtgtgtaaaatgagcttgtagccagaaagggtaaaacataggtcagaaagaagttacaactaacagtgacaaaatgaagatggcaacatcatccataaagacattgacagaaaagtagaaaaaaaattccattctattctaagtaaagcatttactgtcattatcttttctgtcaaaaaaaaaaaagagagagagaaagaaagaaaggaaagcttatcaggaattaaatgagtattttacttgcaaataatttcccaggtgtctttttaaaattatcaaagtaatgtgtgcttagactttttaaaatttcagaaacattcaaattcctctcttccatcacttaatcccattcttcagagttaatcaaaatttgctatgtgtacccaataagttaatgcatatacagagtgatatacaacatacagacaaatgggctaataataatagtgcatgctattctgcaacttgctgattttatttaaaaaatagaccgccttcttttccgtgtacttctagagttataacaaatgtttaccaattgtatgtatgaatggcagccagcccaatattgatgactgtttagattgttgccatggtttttactgtggttgcaaaggacatccatgtacatgtgtttttgaggacatatgtgagaatttctgcatgtacatctaagacattgataaattctgccaagatagcttaatagtgtatccatttattctcattagctgtttatcataagcacttttatttgtatactttctaatatggattttagcagatgtgattccattgtttccatttttatcactttgagtgaacatctgagagggtgtggattttttttttaatatactcttcttgtatggaagtccatatctgtttgaagactgtaatatggacaggatctttgttgtaaaatgtttaagaggttttgctatgttgcctccatagtaaattagaacatccattaattctgcctttgaccttgattactcatgcagtgcttttgcccatgcgttgctctataccaggggtctccaacccccgtggcgccagaacctgtctgtggcctgtgaggacctgggctgcacagcagggggtgagtatgggcagatgagcatgacgctggagctcctgtctgatcagcagtggcagtagattctcataggagtgcaaaccctattgtgaactgcacgtgtgaggtatctaggctgtgtgcttcttacgagaatctaactaatgcctgatgatctgaggtggaccagtttcatccacaaaccacaccccatccccattgccctcatctgtggaaatattgtcttccacaaaaccactccctggtgccaaaaagattcaggactgctgctgtagactgcataactggattttaggattctacaaagtcagtattttgggtattatgcttattcactttagagacctcaaaactgtaatgagctgcaaaattttaactcatttgctatggtatttgactataattcttctatttaaaccatattggtaatctgtatttatacaatagctttctcatattccaaaacaaagatttcttttttataagcaactttggattttgctttcatttttccctcctttcttaggtcagtttgtaagctatgtgtaggatatagcaggttagatagctgaattcatgacagatagcatgaaatacatacaatttttcatcctaaaaattttgtagtaataccgcatttcttattttcttattttttttttaattttactttatgttctgggctacatgtgctgaacgtgtaggtttgttacataggtaaacatgtgccatggtggtttgctgcacccgtcagctcatcatttacattaggtatttctcctaatgctatcccttccctagccccccaccccctgacaggccccagtctgtgatgttcccctccctgtgtccatgtgttctcattgttcaattcccacctatgagtgagaacatgcggggtttggttttctgtccttgtgacagtttgtcagaatgatggtttccagctgcatccatgtccctgcaaaagacatgaactcatcctttttgtacaccatggaatactatgctgagttgtattttatggcatggatgcagtgtttttttctgttcctgtgttggtttgctgaggatgatggtttctagtttcatccatatccctgcaaaggacatgatctcattcttttttatggttgcatagtattccatggtgtatatgtgaacagctcctgcattcattgattttttggaagggtttttcatgtctctgtctccttcagttctgctctgatcttagttagttcttgtcgtcttctagccttttttttttttttttttttttgagatggagtctcactctgtagcccaggctggaatacagtggcgtcatctccactcactgtaacctctaccttccaggtctcagttcaagcagttctcctccctcagcctcccgagtagctggaattacaggcacacgctaccatgcccagctaatttttgtatttttagtagagacggggtttcaccatgttggccaggctggtcttgaactcctggcttcaagtgatccacccacctcaaccttccaaagtgctgggattagaggagtgagccaccatgcctggccttttagcttttgaatttcttttctcttgcttctttagttcttttaatggtgatgttagggtgtcaattctagatctttccctccttctgatgtgggcatttagtactataaatttcccccttgacactaccttagctgtgtcccagtgattctggtacattgtctctgttctcattggtttcaaagaactttgttatttctgccttaatttcataacttacccagtagtcattcaggagcaggttgttcagtttccagaaactgcaactaatgtgcaaaataaccagctaggatcatgaatgcaggaacaaattcacacgtagtagtattaaccttaattgtaaatggcttaaatgccccaatcaaaagacacagactggcaaattggataaaaagtcagtacccatcagtgtgctgtattcaggagacccttcccatgtgcagagacacacaggctcagaataaacggatggaggaatatttaccaagcaaatggaatgcaaaaaaaaaggagagtttgcgatcttagtctgataaaacagacattaaaccaacaaagatcaaaacagacaaagaaaggcattacataatggtaaagggatcaatacaacaagaagagctaactatcctaaatatatatgcacccaatacagcagcacccatattcataaaacaacttcttagaggcctacaaagagacttagactcccacacaataatagtgggagactttaccaccccactgtcagtattaaacagaccaatgaggcagaaaattaacaaggttattcaggacttgaactcagctctagaccaagcggtcctaatagacatctatagaactctgcaccccaaatcattcttctcagcaccacatagcacttgttctaaaattgaccacataattggaagtaaaacactcctcagcaaatgcaaaagaacagaaatcataacaaacagtctctcagaccacaaggcaatcaaattagaactcaggattaagacagaggattcttttcttttcttttcttttctcttctcttctctctttgtttctgtctctttctttctttctttttctttctttccttctttctttctttttctgtctttctttctttccctctctctccttctctctctctctctttctttctttcttttttttgttttaatggagtctctgtcgtccaggctggatggagtgcaatggtgcaatgtcagctcactgcaacctcagcctcccaggttcaagcgattctcttgcctcagcctcccaagtagctgggattacaggctcctgccaccacccctggctaattttttgtatttttagtagagtcagagtcagggtttcaccatgttggccaggctgatcttgaactcctgagctcaagtgatccacccacctcagcctcccaaagtcctgagattacagccgtgagccacctcacctcgccaacatttctgattttcagtggttactttccatttagtgactgagtatgaagatattttaggagattcaaacctttaaaaaattttttaaaaaaatctatttatagcaaatatctgtacaacctttctccagagtccccaactgttaacactttgccacatttgctttatctttctttgtctccctcactcacaccttcccctccttcctttcctctgtctctcaagaagctaaacataattgcagatagactgacattttgttcctaaacacttcagcctatatctacaaaggcaaagggcaatcttctgtgtagccgctgtaatgtgtgatgtaaatttcaaggaatttaacatcgatacaatgatatttcttttgtagtccatattcaaagatcctcccaattgttcccaaattgtcctttatagcttttttaagcctttatttatttattttttagcagttttaggttcacatcatagagaggaaggtatttcccatctactccctgcccaaatgtgcccataccctctccattatcaacatcccccaccagagcggtacattttttgcagctgataaacctaaattgacacattgtaatcacttcacatttatagcttacatgagggtacactcttggtgtacactctgtgggtctggacaaatgtataatgatatttatccatcaacatagtatcaccctgagtattttcactgccttaaatattctctgtgctgtctctattcatccctccgtcatccctcagtccctggcaactactgatattttcaatgtctctatagtgttgcctttttccgaatgtcgtataatacaacatgtggccttttcaaattggaatcatacaagatgtagccttttcaaattggttctttcacttggtaatatgcacttaaggttcctccatgtcatttcctggcttgatacttcatttctctttagtgctcaataattttccatgatctgtatgtctgatactttatccattcacctgatgaagaacatgttggttgcattgaattttggcaatcctgaataaagctgctgtaaacatctgtgtgcaggcttttgtgtggacatgattttagttttcaactcctttgggtaaatactccaggtattgctgcattgtgtggttatagtatgtttagttttgtaagaaaccaccagatttccaaagtgactataccgttttgcattcccagtagcaatgaacgagagttctgttattccacgtcctcaccagtatttggtgttgcctttgttctgggatttattctaattggtgtgtagtggtatcttgcgttaatttgctgctccctgaggacataagatgtggagcctacttctttgccatctctgtatcttctttggtgaggtatctgttaaagcctttggcccttttttaatgtttgtttatttatttactgatgagttttaaaggttgtttgtatgctttggataatttttttaaattattctgaccaaaagtttagtcaaatatacagatcacattcagttatcatgtatctttattttgctttagtatagaacagtcttctcacacacacctaatttgcaccttcaaaaatttgaattgtaagggtcagttgtttgcagaattatcctgcaacctcgatttgttttattgtctcctcattgctaaatttgggttaaactttgttgtcgttaatgctgaatcctttgtaactgacaatgcccgtgtgaatcttagttacagtgatgcctgccgaatctcccattgcagaaataaccctcctcttttgaaattattagggaatctgtgggcagatacttggaaactgccaaaatcccgattcccaccaatcttggatccatttgctgtagcttctactggtgatccttgagtgaattaattattatatcagtgccttcaaaaatatgattgtctgtgccgacagttcttgccatatttattctgttgttctgtatggaagaactctttcttactcctcacacgtatactttttaatattatcatatattcatggattttttctttaatgtattataacctgttatcaatctattcttttttgtatttatattttcccaaacttggccagtgggacctcatttgtcatagaacatagggtattggttgaataaactatgatttatccacacgtgaggttactgtatggttgtgaaaaataataaggaaatgtgtatatactactgtagaattaattgtaggggaaattaagcgaaaaaagtatataacatgctatcaattatctaagagaggtgcttaaatacacacacacacacacacacagacacacacacacacaccagcttctgttagaggtaaagcagaaatctaaaaacaaacaaaaagatagtgaatatattaaacagacaaaagtagaagtgagacatctttgacaattttatgtttttaaagtttgactttagaaacttgaaaatattttccataattataaaacagaattaaatattttaaatagaaagttctaagaataaaaaataaagtcaaaaaaatgaatgcaagtatctttagttgtaatcatagccacattattccaagtgactttagaatacagcagtttgactatacatctttaatgaggtacatcccaagacaaaaagaactacaagcagaaaaacttaaactatgattagtaatcaatttaatggtatcattcacattgtgtatataatgtagtctaaaataatgagtaattatgtgacatctaatcatttcattttcacgattttgaacaagagaaaagaagattaagatggaagacgaaggagattatttaaaaccctctactcctcggtttgaatgggaaatatcagattgaactcgtgatgtattttatctttaaaaaacgaacaaaacatacctcttgtcactgaaaaagctgacagacgtttatgaatccactagcaatgagtatctctaaccatccacatcgtcatctttaaatgccatttttatttgtcaaaatgatttattacaggtctagaacaaaaagtgttcaaagcagactggagtctcttgtcatacaggatggcagggaagctaccaaagactcttgcgcctctgccacagttcaggatcccattctaagatgtgccaattagctatagataaccaccaatcaaaataataagtacaatcgatggacatcattaatatgtgtgtgtctgtaatttcgttttttttttttgagacggattttcactcttgttacccaggcaggagtgcgattgtgtggtcttggttcactgcaacctctgcttcccaggttcaagcaattctcctgcctcagcctcccaagtagctgggattgcaggcatccgccaccacgcctggctaatttttgtatttttagtagagacagggtttcaccatgttggccaggtgggtctcaaactccttatctcaagtgatccacctgctttggcctctcaaagtgctgggattacaggcatgagcctcgcacccggccttttctataattttttaataatgcttttaaaaattgcatttttattcattgctagagtcaacttattttgaaaatgtataaaccaagaaaataatagagcatttattctgccttcctatacaaaatttatctctgagtaacaaaatagctattgagggaaaatttatcttgatagaaatatgttatctaatagtttgagaagaagtgataatattaaaagatcaccattttacaattttagcgtatcttccataaagaagatacactacagccaaatgtagtcagactcaggcatagtcacatagtgcttccttcttgaagaacaaagcagcacccttacaggaatcccagcaaaacatattaagcctaaacctagtcaagcctgtagaatcaaatataacttttttttttttttttttttttgagacagagtcttgctctgtcgcccagactggagtgcagtggtgcaatctccactcactgcaagctccacctcccaggttcacaccattctcttgcctcagcctcccgagtagctgggactacaggcacctgccaccacacccggctaattttttgtatttttagtagagacggggtttcaccatgttagccaggatggtctcgatctcctgaccttgtgatccgcctgcctcggcctcccaaagcgctgggattacaggcgtgagccactgtgcctggccacaaatataaaattttctataataaggacaatgaagaaacttgttcagtaataccacccatatgcaactggcaaaatttagattatgagaaattctacaatggattaacccatttttcttcaaatttaattgtaaaaacaggaagagagatgggtgagggaacttgtaaaagcaactgaagagaaaatgttgtgaaattagagagtgttgatggctgcacaaccttgcaaatattctaaacactgctgaattatacactttaaaagggagaactacaatatattagttatgtcttaataaaaaaacattgaacgccaggcacagtagctcaggcctgtaatcccaacactttggaaggctgaggcaggcagatcacttgagcctagaagtttgagaccagcctggtcaacatggcaaaaccctgtctgtatggcatatacaaaaaattagctggatgtagtggcacattccagttgtcccagctactggggaggctgaggttaggaatcccctgagccctggaagccgagactgcaatgagccctgatcatgcctgcactccagcctgagtgacagagggagacctggtctcacaaaataaataaataaataaatacattaataaattaataaattaattaattaaattacaagaagatataatatacattccttccagtcccaaaatatggacttgtttggatctcgattcaaacagatttggaaaaaattaaaattatggacacataaatatttgatgccattaaatgcttatttgtaatttttcagttcctctaatggtattctagttaggttttataggaaaattcctccttcgtagagatacatatggatcatttttgttgagtaaataatatgatatctgagatttgcctcaaaataatataggaagggaaagtgggtagtgatattgataatatcatttatccatgataattcatactgataaaacaaggttggactcaagttgataattgttgaataaggtgatgaatagatatacatgggtctcattattctgcaacttctggataggtgagtaatttcccctcaatgaattggattttttaaaaattcataagtacattttgtttcctttatttcaactccaacatcatgaagctccttctcaccttcttcagccactgtgaaaaactcggtttccaaaaacatcagtaagtttagtaatttttcatcttaacataaatacaaatagtttctgaattcctacacctatatcataccagtaatcaacttagtaaataaagtacaaaatttcttttgggttcctttttttgtactaaaggatatacagagcactgtgtccaaaagttacttgaactacttttatttatgtactgacattgtcagctcaatatgtttctggtaattttcagttttagagtttgctttttttctcctttttatttagtaagtattgttgtgattttgtgaaacattttctgtgcctcacacctgaaactgtagatagtcacgttagggaaacatggctcccattcgatccctttaacccatttccctactccctcataggtaaccattttcactaacttcgattttcctttctacgtttccttttacaaaaacagctacttttgtatgtacttaattttctttgcttttgacatagaaagtcccttactatattctattttctgctttgttttcttttttcttcacagattgtacttgtcttctatggtcaagcatttcacttgtttctgaaaattttttttccttttttttttttttttttttcagacacaggcttactctgtcacccaggctggagtgcagtggcccgatctaggctcactgcaacctccgcctcccggctcaaacgagtatcctgcctcagcctcccagcctgtagctgggattacaggcacgcacaaccacacccggctaatttttgtatttttagtagagaccaggttttgccacgtgtgccaggctggtcttgaacccctgacctcgggtgatctgcccacctcagcctcccaaagtgctgggattacaagcatgagccaccgcacccagcccataattttctattataaataatcccacagtaaacaccttgcgcagatgttgttttgcaatcgcggaggtatatgattttgagtgttaatcgcaaccattggaatttgggaagcgtggcataaactcgcatgtggttctgttgggtagtgctgacctccccgacgtgcctgagtttccgggtcagcttcatcaagagcgtgtgttgttaagctctcaaaccctgaccccagtaattctatacagcgtattccatggctttaaaaacattaatttaattctgtcaaataaaatatatatattttaaagtgttcataatatttatcacaactagtaataaaataatacttaaagaaaaaagaagtgatacttgaggcatttcttgcaatgttgacaatataaaacacaattttaaagtgggtttaatgggcatagctttggtgatccgatatcctttgtattcatgaaagagggaacccagagaagtgaaatcccgaccctacatgctcaaacagcactgtcctctgctcttcaaaactaaatcacttactgcagttgctggcatgtagccaaaccgagtgattcctgagcggtcccccctcccgccccctatggagcccctctggtgtaggatcctcatgagcagcagaaaggtctcaggcctgtggtgggagggacatggaggtgacaaggcccaggcctgcactggctaattagtgtggggctaattgacctttcacagtaattgtattgcctgcctttgggaaccagagaaggggcctttcagtatctttacacagcataatatttttgatcataatgaaaatcagtcataagaaatgtgaaataaattgaaaggctaaatcacaaatattcatcttttagaagtccccctttttttaaatgaaggatcagtttgaaaggatagtttctgttctcatccaattaatataaattggcatttagtgttcattgaaaactatggaggggaactggagttcaagtgaaaaaatatcactgggaacaattccctttttgattattctgacttactgtgaacatctctggctcatcttgtcttgaaacacatttcattgttagcagtgaccaaacaaaatagttcttagccattacattaaaaaacacctttaaataacacctttttttttttttttgagacggagtctcgctctgtcacccaggctggagtggactggtgcgatcttggttcactgcaacgtccacatcccaggttcgagagattctcctgcctcagcctctcaagtagccaggattacaggcttgtgccaccacgtctggctaattttttttaatgtatttttagtagacacgggtttcactacattggccaggctggtctcaaactcctgacctcaagtgatctgccctccttgacctcccaaagtgctgggattacagacgtgagccactgcattcggcctaacttattaaatcattgccgttttgtcttttcttggcatagaaaatacgttattaaaaactgtgatgggcttccaaccacatctgcttaaagccaggtgcagtggctcaggcctggaatcccagtgtttgggagtccaaggcaggagaatcatttatgcccaggaatttgagaatttgagaccagcctgggcagcataagtgagatcccatctctacaaaaaaaaaaaaaaaaaaaaactagaaaattagctaggtgtagtggcgtgtgcctgtagtctcagcaactcaggaggctgccataagaggatcacttgagtctgggagttcgaggcagcagcgagccttgatcatgccactgcactccagcctgggctgtaacagagtgagaccctgccttaaaaaaaaaaaaatctgtttgttagaagttattttcagaagaagcaaaaaatagaaagaatgccaagattgttcagcacaaaaaaggacaatttaaggtgttattaaaagtgtgtcttcaaagttatttaagaaagaactcaatgtaaaaatgttttaacattagaatctgttaacactattgatttttaaattagtctgatcattcttggctgattgtattccttttctagatagaaaatgtagtctattaaaaatccaaataaaaatcagaaatgttcagtctttaaaatgtaaagttattacacattagaaagtttgacagccttccactgaaatgatttttttcccataagttattggggtacagatggtatttgtttacgtaagttagttagtggtgatttgtgagatcctggtgcacccaacactcaagcagtacctactgcaccatatatgttgtattttatccctcactcccctcccaccctttcccctacgtccctgaagtccattgtatcatgcttatgtctttgtgtcctcatagcttagctctcatctatcagtaagaacatacaatgtttggttttccatccctgagttacttcacttagaataatagtctccaatcccatccagattgctgtgaatgccattaattcattcctttttatggctgagcagtattccatcatataccacgatttctttatccactcattgattggtggacatgtgggttggttccacgattttgcaattgtgaattgtgctgctataaacttgcgtgtgcaagtatcttttctgtataatgacttcttttcctctgggtagatacccagtagtgggatttctggatcaaatggtagttctgcttttagattctctaaggaatctccacactattttctgtagtggctgtactggtttacattcccaccagcagtgtagaagtgttccctgatcaccgcatccacaccaacatctactgttttcgatttttttattatggccactcttgcaggagtaagatggtatcgcattgtggtttcgacttgcctttccctgatcactagtgatattaaacattatttcatatgtttgttggccatacactgaaatgattttaagcattttgtatgaggaaatagagtttaacagatttagaaggaactgaaaatgaatgaatgatactgaagatattgaagacagccctacctactttacagaccatagacagtggtacagtaagtatgccaatgagtatagactgatcagtatgctgataaaagcacactggctgggcacttctgccaacatgtctacttatgtcgtgagcacagagaggtggacaatccaaggtgggatgtttgaaatagagcattgggctcagagccagaaaactgaggctgcaggcctggctctttcatttcccaattatgcatcagacttgacttgggtaagttactaacgccatctggaatgtttcctcacttctaggtatgtgcttaaaggatcatagagtcattcagtagacacaggggagtgtgttttatgaacaggtccctacagtaggtactacagacacagttgcagtattttttcttaaagacggtattgtctggtaacagagagcaacgcatacaaagaaactacaatacgacgtgataagtgcagtcttccctggggtgacgggatctccagaggtacagactttaccttgagccagcaccagcatccggagtctgcgaggtgtgttaccagctcacctataccatcttcttttcactttccatactctcactgattcctctgcaacccacttgttcttactttcatcctttttgtttgttttgttttgtttcctctttaaaatcacactggactaatctttactttgctacctcctatacagccccgtcccagatcctgtcttctcatgtttttaacatttcagctatctggctcttctctgaatcattccttcgtacctggggtggttccgttgcagcatccaaaccctggtcttcaccatgggcccctgtagacttgtcctagtttgtctgcctcatccaagtctccacttcctctcagcagagtcaatgaacaccagcagaggagtcgatggcctgggttcctaccctggcttcacactcgggagctgggtgttgttgaacccatcgtgaacttctctgtggctcccctttgtcttctataaagtggaatcaacagcaaccacaataagtaatctgtaaaacagcattatctgtgccaggcacagttctcttggatttacacactatttctagctctgtttacacactaactttatgtatgttgtcttgtattctttgtcttgctataacaaaatacctgagactgggcaatttataaaattctgaaagctgggaaatccaaggtcaaggtgttggtattcagtgtctggtgagggccttcttgttgtgtcttcacttgctggaagaggggaagagctaaaagggcaaaaaggacagaaagtcacttgcactgccttataagggcactaatcccattcatgaaggctctgccccatcatgatttaatcaccttctagaggctccacctcttcatgcaatcacattgatggttaagttgaaacaaataaattttgaggacacattgagacatagcagatggtgatagttattccctcatcagagtgtgagaataataaataatttattatgtctcaaaacctgtaatggtctgcaatatacggctaagtatattctatatgttttttattattaacataactattttcataactcctgaaaacaatgtattaataatgtggtattgttaacaattttagaatctcattattaatcattttagagatgatatttgtaactctttattaagtgcttggaagaatctgaaatatttggatcttaactatgtgccgttgaaggaacttctttttggaaaaagaaaaatacatcagttttttgtatattattggataatgtccaaccagatgagagttgatcattgtttggcaaaaaaaactcccatggatgttttgttaatactggtatgtttccatgtcaaggatcctatagacagaaagcccaagatactgatccctcagtctcccatgggtcatcagctgtgcttgacagtgtaagaccaaacccggttacagaaatacctacttggtttgtctacactgaagaatttgttactgccttacttgttggattaatatattgttataaaaaaagaaagaattgtattaagggttttctctttgacaggtaatattttatttattggagaaacaaagataaataagacattgtttctgctctaaggtagcctgaaaccatattggagcactctgatgtcttcccaccgaaaatctctttcttcccacatctgaggaatttttttgtatactaggagaactaagtagtatttggggcttttgcgtggctgtacaactggactgtatccaatgtactgtccatggaatgtggctttgaactgaaccagtgtggtgtgtgagtccactgtctgtcaaaggcaccgcttctggaaccaagaagattttctgtaagagtcaaagattaagcaattaatgatttcagaaacagggatgccaactgagggaaatgcgtcctataagtatcactgtaactactgaaatctgtttgagaactttcttttcccctttgcagctgtaccctgagcattaggaaaatctggatttgaaatcttttagatttcatcaacatttgtcacattttacctgtccctgaaaattcactcaggttcttcacgtgtttcatggcatctggctatatggtgatataggaattatttttttgtatcgatttttagttcacagaaagttggaatgctaccagagagattgtcacattgatagcttctgcttattctgccttctctgtatattttccaaacagaagtgtgcagctaaacagaattctgacaccttattcatgtacaagattagggacccatcctctttagttttctgaaactcataaatggtaacaatactaccaacgatgtatcattgcggatcgggatctgagctctttacatttccttaaatcttcaaaacagccttcaaagttgatatattattgtcaatggcagaaagctgggaaaggaagaatcatttgccaaaattcatacagctaataaattatgtagagcttgagtccgtttgactttaaattctgtgtcctttctttcttgttctgctggttccctctgtggcactttgggcactgagcttatgactgtttatattcattgattcattcactccttcattctttcttacttcccttcagtcattcactttttcaaacttttagaattcatagatatgtttctacatctcctggctccaaagcactgtgtgaggtgttctgatgaatgctactatggccaagttgctgctctcaagtatttctaaaataagttggaagataagactcagacacagacacacacacacacacacacacacacacacacacacaatatatatgtatatactgtccaagctctaaccactgcaataagaagagcacagtaagcaaagatttttagattcagatgagggagaaaggtgttacttttctctaggaggatcacaggaagtaactgagtcctgaacatggaaaggtagggaaaaaatgtggatagaaacctcaagataggctagggtgctaattctccacttttccttctgtggcaaagctcacatgctcctgtgcaagtccttgagtatactcggatcctgatgcccatttctctgaaacgacttaggctagaggctgtgcacagctggaggagtgctgcctgacacggagctgatcatggacagtgatagcttgtccaaatagaatggaaaatagaggactgtctgccattattgattagaggacaagcagaaatctcagtgccataaaagtatgccatcttctcatgtgcctacaggtcagcgagggtgcccgcggcctcaggctggcttcagctgcgggtccctgcttcatgctgtgagtgtggctgcacttggtcacctcagtgggttggactcaggtctgggccatgtgtgaacaggtagaagctttctgggaagttctgttttttgcaacggagtcttgctctgtgcagtgcagtgcagtggtgagatctcaggtcactgcaaccttcgcctcctgggtttaagtgattctcctgcctcagcctcttgagtagctgggattacaggcacgcaccaccatgcccggctaatttttatctttttagtacagacggggtttcaccgtgttggccaggctggccttgaactcctgacctcaagtgatccgcccaccccagtctcccaaagtgcttggattataggggtgagctactgtgcctggcagggatgttcttttgatggaccttagcagcgggacaaatataaggccctggttcaaccacatctgctaacatccctttggccaaagccattcatgtggctggacacagattgcagggaggaagtggggagcatgatgtatgcgcactaatgtacaggcgtgcatgattttgaagaatagtttaatctgccacatgtatcatataggaggggtaaggaagatgaaaaatcaaatctagatcatgatttagaaaggaaaaaagtacaaacacacttgaagaacatgggagatgttacagtccattttacaagtaatactgagacactttagaaagattatgtagcacacacccagaattcttgtatgtattggactggagtatggcgatatcagatgtggggagtaattacaaagctattatcatgaggaaggcctaaaacggggaggtgactattgagatgtaaaagagttgaagatgtgaagggtaattctgagacagaattgctaactgttggtgccttgccgatgtcaaagattaggtaggaggaattcaagatagtgattctcttgcagcccgttacaaaacatgggaggataatgagatttttaggtgggaggggaaggctcgaagcgggtgatgtgggggatggtttttcctttgacagaaactgggaagtcatgcaggggagcacttcaggtcagagaatgatgcacagtggcctctgctgagtaggagcagtcctagggagagactgggagctctgagaatggggaggggcacagggcctggggatgagacggagccccagggtgtaagagtagagaagaggttggaatgggatttaaggacgaagggtgtcctggtgccctcctgggtggaggaggcagattctagccattgtatttggggtcaggggtgttggtgagtgctgggcaccactgttcgagggacattgatggtgagggcaacagaagagcttgagaaagcagcagggaagggcatcattcatcgctatgagttatggatgcatttcacttgagtgttcttggagcattcctaaaatgacaatggcaagaggtatttgaaaggcattggtttatttgtatttaatttaatttaattttattttttgagacagagtctctctctctgttgcccaggctggagtgcagtggcatgatcttggctcactccaaccttcgcctcccaggttcaagcaattatcttgtttcagcctcccaagtagctgggattacaggtacatgccaccaaagccggctaattttttttgtatttttagtagagatggggtttcaccattttgccctggctggtcacaaactactggcctcaagtgatccgcccgccttggcctcccaaagtgctgggattacaggtgtgagccactgcggccggccacatcgatttactgagagagtaaggtccttgctgtgtcttaagagggtagcaagcatatgagtaactgcttctatgtagtagatattattttttggttgggggggtgggggtggcgttcaagtgatcctcctgcctcagcctcccgagtagctgggattacaggcgcacgctaacacgcccagctaatttttgtattttcagttgagatggggttttgccatgttggtcaggctcttctcgaactcctgacctcaggctatccacccacctaggcctctcaaagtgctgggattagaggcctgagccaccgcggccggccctatgtagtagatattctgaaactagaattccatttagggtagcctagttcttgtgctagcaaataatctgacttttaatttttatgctacaaaatgttaaagtcttctgttcctacgtgtcaatatgtagatgcaaaaccttttcgtaaatgttagctggttttcatggttaaatcgtcagaaagagaatgaaccctgggtggcaagagtgtgctcctgtcttgcttccccaccagtgtaatgatgtgtgtgttggtgcccgtggagcggtgtgtgtggagcctactcaaacgcattcatttccgatgctttaaagaaatgccctctcattgataataactcactttctgtacttttgtaaaacagagatgaatgacatatcaattctgatgtcaatcagttttactatttaagaatatttttcgtagccaggtgtggtggtgcccgcctataatcccagctactcgggaggctgaggcaggagaattgcttgaacccggcaggcagaggttgcaatgagcggaaatcacaccactgcactccagcctggatgacagagtgagactctgtcttggggggaaaaaaggaattattgttttcactgtgcttatagatccagtttggtaattattttttcctgctagattttatgtccttttgaatatgacgtcagcattctattgtgtttcacgtattcccaaatttctgtttctggccccagttcagtgttgtttgtctaccgtgtgtagtgtgtaactgctgtgggcaaaggagcacctaagttggtcagttacatgtcacttttgcttcccttctaccacggagggcaagttaaactctatctcgcatttcatgtttgacatttcctttttttttttttttttttttaccttgctcccaaacagaattgtgacctggatcagcagagcattgttcacattgtgcagagaccgtggagaaaaggtcaagaaatgaatgcaactggaggcgacgaccccagaaacgcggcgggaggctgtgagcgggagccccagagcttgactcgggtggacctcagcagctcagtcctcccaggagactctgtggggctggctgtcattctgcacactgacagcaggaaggactcaccaccagctggaagtccaggtaattggaatgctctaagattattaaagcattttgtttgtttgtttagtgcagtctgcatggagcatggcctcaccgggtgcatatttagtttatgatacgttttggattggagtctctaattcactacaaggagacatcactgtaggtggagtactttgatgtaacatttgagaatgcatttattgtaagtactatgaaacaggttttcatattgagattaaatataagagatatgtttctagtgatgtagaaaaattctaaaaagcagaaagaactctaaagctaatcgagccatttgtagtttctaaagccagatatgccaatggcaatgacatccttagtgtgaaaggactcttccttctctctatgctaccacccatttcaaaatgcttttctttggcaaagattgttattgtttagttattttaaaaaaattaatatgtgcctcttagtcttttattctctaatctaaatagtcaaaggtgtaatagaattaatttttactgtgtttgacagaagacacaaaataatcacaatgactttacagggtagaagttgattttcctcccacatacaatagatcctggcagttgtgggctggtatggccttcacagtgtcagaaagttctggggcctgcaagatggaagcctaacataataagaaatgcctcctactaaacttactaaataaaatttaaggaacttaaaaattttcgatgatcttgcaaaaaataaaaaaagataatttccaaggacaagtgaaaatgtagaaacaacatctttaaatacaggagtagataagcccagaaagtaaggcattaactgatgctctggtgatcttgagatgattgtgggagggaaagaggctctgcttcatgtgagctgggcacctcaggtctggaaagaaaaattgagaaatggaaataaatgtcaaaaatggggaaaaatgagataaatctaaacccctgcaatactcttgtgaccagaataatatattaatataaatatcgaacccaagcccataacaattctgacgtttcaaccagagtatgtataagatcattctgacactgacacctctagagaatactcatgctccaacattataaaccaaacaatggaaaattccaccttgagtgtgtatgagaccagaatatgccaccccaaaatatgccactttagcataagtattattttaagctgattattttgagaaacagtagacacaggaaaagctctaaaaacagagtagaagtgacccttttgtaagggaaatttatatctaccaaggaagtctccatttgtaagggtgtctccctctccttactaggatgaggaggacagagtctctggagactctgatccttgagaaggcaccaactgaataatctgcctaacaaaccttactcttgtcttctcctctccctttcttcctttgccattgaagatggtattcaagcctgaattttaggcacctctttgagatttatgcattttttctgggtgtctcacatgtacagttgtccctccccatcaacaggcaatacgtttcaaatcccccagtgtacgcctgaaaccaaaaatggtaccaaaccctatatttactatgtttgttcctgtacaactgtataacagattggatttattatgttaggagacctatctactagttctttaatttgatttcccaaaataaaattcttactaaaaataaaaaaatcacattgtttagagcaaaattaaacctttacttattatctgaatattaaaaacaatttgagcacaagaatcctgttgtgtacatattcatgttctttaatacatttcctagtgcatctggctctactctcttatcaaccatattcatctgaaaattttagtcttcttattttgttttatcataaaattgcccttggtcttctccagaattttcttttatgagaatgaacttagaattattgacactttcaactgactctctctctctctctagaccataatattttaagaaaatatagtattctctctatatagggtctgaagtaccagtaggcactgagaaaattctgctaaatgtctaatattctctttatatttttaaattgaaatgtgtgattatttcaacccaaacaatagagaataaattctagtaaatttatggaatgtggtaaatgacagcagccttcagagtactgtatgatctatgatgatgcgctgtttcaccttgactttccactcatgtctgagtcacatctaacctctgatcaccctgtttctcatttacccctctgtcttgtggcctgccagccttgtgcttttggcaggctagggactggctcaggcaactctacatggtgcagttgggggctgcagggttgccatcctaacacttctccctgcaccactacacactgggggcaacttcctggcaccctacatgctgctactaaaaggcctctgtaaagatatgttgcatctgtaaagattgggaaaagagagatggtgcatcccaggtcaactttcagatttaactctgtgttaaactaacagctaaactacaagtaatcctctcctgctcattagaactggagggaatccttttcagaactcttaggactctcccttattacttgctattttgtactccagttctgacttcaccttttaatctctttgaggatggagtttttgtccaattaactgtagttttccccaaaatctcttagaagagtggtgatacatgtttactaaattgcttcaaattgtaaacatagtcagtcattcaacagaactcctgtgcatttagcttttagagcgaatgctttatttaaaattatacagagaaattgagatttcatctcttcaaatgtcttggttcattcttggtttgagttaagactgaatggaatgatttgaaatgactatatgcaaacagtatgcctatatgattatttttcttcactaaaaatgatagcgtaaagttactagagcagagattcacagactctcatgtgcagaattatcttgcatgtttttccatgtttctttgatggccagaatggcgagaaaaaaaatcttctttcattctttttctgtgaccagaaattttgatgtatttgtctgggggtagaggccccaaaatgttggtactgaccatactctgagaaactctgccctatggctaaggttttccagccttacaattatggatcctacctgttgttctcacggaacaatcggacgctgggtgggagaacagaggcaggtcggtgagaggtgaacacaccaagccaatcacagcagcctgagaccattcctctttacgtacttcacatattaaacacataaaacatctatcatttgaaaagatgaaaaaaatccttggttatacaatgtttgaaaacctgtgcctcagaaaaagagattaaaagaaatcccaattttctgtgcttccagagtcttcaattttaacttcgaagaatataagtgctggctggacgtgggagggctctaatgggtgaatagctgggctgtagcctcatatgttgtcgaaacaaatggaaacttctgaaacccgagaaggtgcctttcaagtatttttagttggcaaaagataagtggtcaacatgagaggtgataacatgatgtacatgaagaaccagttacactgttggtactaagaacgcaagcatgtcacactaaagacttgtaagaggacgtcaaagaactggaacgagtcattgaagtagtttttacagcagtgccactcaagctttagtgctcatcagaatcacctgaggacctataaaagcacagatgactgggcccagaccagttggccttggatggaagctgagaagttgcgtttccagcaagctcccaggtgatgctaacaccgcgggcccaggggctgtgctttgagtagtactgcccgaaatagtaaaaaatagtattccttaaaatatggtcagtgaataaaatctatttttactacattttcaataagaacgttgagctgcacctgggctccagggtgcctgtgtgtaaattaccttcatgtgttattggtgtttcctaaatgaggcgccattcatcatctcctgacagatgagatgaagctattggacctagcaaaaaaataggaggctcctccaatatccgtcatacagttaacgaactacataaacaaataacgattgagtccttactctgtgccaagcacagtgccaggtactgggatgtagcagaaaatagaaacagacaagatgcctacctcaacggagctattctatttggagcagctagtaagtgtgtgttctatcgagaaacagcagagtcaaggggacaaagagtattggtggggagttccgtaatatacagcagccgcgaggcctgtgtgatgagctaaactgtgaggagggcaccctcagggagcatccatttgtgtgccaaatggcagaggcgacagcaactcgtgagccccaggcaggcccccgcccagaaaacgcagcagccagtatggggtggagcttggagcaggtggagctcggagaagaggatgtcagaaaaagggcagggtggagaggtcaggtagggtctgctgggcccaggatttgaccctgttgagaaaatttgacttttgaacaatggagtgacatgatctgacttcaggaagcctcatgctggctgcttgtgaaggaactgcaggaggaaagggtggaggcaacacaacccggaaggttttcaaatcctagaactgctgcactgcccagaacatcgcgaacgggccatacctgcaggcggtgtcggtgagtgcttgccgcaaacctggcactatagaaaccctgtttccctgaaatacctcttttaattccttgcagccttgtaaggtagaccatgttcatatcctctttatagatgaggaaactgcagagaccacttgaggaaccgacccagacaattcaagccgtacccagggaccgtctcacttcagagcttatgtaaaatatccagtagcctgtgttttcctgaatatagctatcaggtgaaaggaaattttgcatttcctctagatgttttggttagaaagtagatatagtcttaaaatggacctttttgaagagtcatgttaattgatttcagccaagtagtcagattttaaaactatatcacaaggtatactactttttcagaattttttgcttttgagaaaaaaaaaagaaaaactgtggccacgctggccagtctggtctggaactactgacctcaggtaatccactgaccccggcctcttgaagtgctgggattacaggtgtgagccaccacacccagccccatgtttttgcttatatgcttccaaaaggagaggagacatgtcatgaaatagagcgggaaggagtgtcagcatgcaattgacaaaaagctgcggagaggaataccatgccggggcagcacaggctgaggctggccccgtctaccttgtgcttttgttcgtgcctgtttgggttcatgcctctgtgggaattgttttgctttttgtggttggttatctgttttgaaacataaagaaataaaaagtaactgtgggggagagtaggtgagaaatgacagcattggttgttgaagttaagtaaagtacttgtagggagcctcaaaatgttttgatttttctgaagtcacctctgcaaggtcatattgtgatttcaaggggaagggagacattgcattcaagactccatgaggcctggctggacagtgtgctcttctaacgacaggcctctacaaatggtagtgtctgggtgtccctctcctggaggcctacatggccagtgaagcaaatcatttacatcttttactcttcaaaccctgaagtgtttcagaggacactgcccatatgccaagatggggagatctgcacttgacaggaatgagcgtggaggcagggtatttacagctggggaggtccatcttgggaatcatctgagcatcgtaattattgcagagtctgccaaaaatgcaggcaggctgctggattccactttcttaaagggaagataaagaaaaaatttcaaattaagtggtagaatttaactgtctgtaatacactcttttcaatctttctaaatttgttctgagtaaataaggactaatggaaattttgtgaaattttatagaaggtgttattttgtatgacctgtagcttccaaacatttcatacataaatcaagaatttatggtctacttatgtaagaaaaacagaattaataaaatatctattatataatagaaaatgaaacccttatgacaaggaaaatatcactacattcttttttagagtactttttgataatttcacagaatcaggcccaaactcctacaccttcttcatctatttgactataattaattttccaaatgatacctctgatgctctgtaagatcttacaattcttcctcaatccccaaaggttgactacctttggtgttagaggtgtgttattagattctaattctttgcaaattaatgctcaatcttttctgtgcatgataattaaactcactagagtcccagtgcatcagtggggttgtgatttgcttcctgtaagaagggaatcaaatggccgataatttacttcagtggattaaatgaaaatcgtttgaaccagtgtttaccacagttcctggtatatactacgcactgaatacagaatttttgttgctagaaaatgcagtcaaaaagggtgacagacattgattttgaatccttgagcgcattcatggtacctgggctgtgatgtgtctgccatgcaaatgctaagccgactggcagtaagtgtgggccccggagccaagcaacttagcccgtcttggctctacttcttgctacctctaggactcggagaatttactttcttgcagtccaaagtgtgatctgtgggccagcagcagcaattgggagtttatcagaaatgcagaatcattggccccctatcagacctactgaatcagtaaccttcattttaataagatcctcaagtgaatagtgcactgttttgttttgtttttaaacataccaggccacagtttccccatttctcatacagagataaggaaaaagtacctaactcatgaagttgatgtcagatacttcgtgacaagggcctagagaaaggcctggaatataccaagtgctgactatctgttatccatttcagttatccctttgctttctagttcacatgtacaaaggcccaatattgtgctcaggctctaaaatactacctaggtttacagatccagggctacctgcctgaattgcccccagaacaggtgctaggtccccaacccatacttgggagacgtcaggttactctagttttggggtcagggtttttattttattttattttattttattttattttattttattttattttatttttgtatgaatctctttgtttacttaattttaaagtttgatcacctccaccacacatttggagctaaattagaatagtgggtgctctatgataatgatggatggcatgaggaataatacttcccatggctgtttttctggagtgttacattttcgttgttttccagccctgaatgatgtatggcatatgtatttgttttccattttatgttgggaaatgtagtactcttttttgagtacttcatccaaaaagtggataaattttctactgggacttgctcaaaggaccctttggcgatgagtgtgtaccccacttcatattttgaaagagaagattagctagggataggtcacagatataggtcacagggggcttaacaaagctggctctggcagtggatgaaggatgggggcagttaggaacaagttagctttcagcaagtgggtgttcattgtgcaatgcaaacacagctcttattctaagtgagcaggaagacggtggacacagattcagattgaatcaactgagcactgttttcagatcagggtcagtgcctcaaacaacacactgggaactgagtcctgctaatgtgtctttttggatatttcctttttttttttttttgagatggagtcccaccctatcacccaggctggagtcaaaggtgccatctcagctcaatgcaacccccacttctcagattaaagcaattctcctccctcagcctccagagaagctgggattacaggcacccaccaccatgcccagctaatttttgtatttttaatagagacagggttttaccatgttagccagactggtggcaaactcctgacctcatgatctgcccacctcagcctcccagtatttgggattacagatgtgagccgccatgcccagcccgtctttttggatattttcatgattcaaatacatggatctttacctagtcaaagacggtccttccttagctgcaagaagaaagtgtgtatgcatcttcatgaagttgttctgtttggagataagacactcttctctaaccccctgaaaactaaggcaaacattttaatctagagcgatagcttaggaaagtatgatttgaaagttttcacagattgttgtttgccatgtaatttctttattgttacaaagaacataaagtcacagcttggtgagtgatactctggcctgagtggttattttaaaaagctgcttattgtgtggacttttttataccaataaaagatttttgatgataaatagccagccagactctttgatttctaattgatggatatgaagttgcctcttttttaataatagttgactcatttaatatttttttacttcattaactctcccattgtggcatcattacaattttggtggtgtctcatatttaacaaatgaatacaatcttggggaaaggtggaccaagaattctaggactagaagttcctacaaatagtgaggaaacatacttcaaattgagcgtttaggatttccttttatgaaaatgagaatgagtataccttgcatattttaattaatacggttagcatagttgctgtaacagttatttattttggatttgtccatttgtgctggtaaagtagaaccatagcttttattcatttgcttaatccattctcttcatgccaagaagaaatgttatgtcccagtaaaatatggacatcttcagtgacaagcaacagcagtcatttagtgggttgtatgattgctgcttattatggagaaacagattagattagattagattagattagattagattagatttgttgcctgttgtcaccagcatgcctgtttcgttaacagagccatccactatttttcatacaggtgatgtttccagtttctctttcaattaccatttcgatagatatgctcctctcttggactccacggcaaataatttttcttgtttctgtgaagaaagaaaaagtactctcttaacatagttaatttaccaggttactgtagacaacagcgtcctggccaccagaatagcacacgcaggtggtaggctgcccgctggaaggcaggctccaggaagcaggggcatttcctctcactctgggctgttgcagtacctaacacagtgctgggcacattgttgatgcttactaacttaataatatgtgttaaatgaatgaaaacaacatttgtttattcactcattgataagctttttgaaaatgggaaatatagttcattctcatccaagattcccaattgtgggtgtcttagcccctttgggctgctatgacaaaatacaaaatgagtcagtggcttataagcaacagatatttatttcttccagttctagatgctgggaagtgaaagaacaaggcacctttaaagctgatgtcagccgaaggctgcttgctggttcatagatggtgccttccagccgtgccctctcatggtggagggagcacagcagctctccagggcatcttctgtaagagcacgtatcccattcacggtggctccatactcatgacctaatcacctccaaatttcttatgtctgaatgccatcacattggtgattaggtttcaacatctgaattatttggggacagaaacagtcagaccatagcagtgggagaagtttgcattcctgaagcagggtctagctcttttgtcagagacagacagatgacttaaccattgcagtcaacactagaaggtaccctgacttcaaaattctatatacagataggcaaaccttattcctgaattcttcacctgacaaatatccatgggaggtttatgttgcacctgcccccaatacagtgatgtatcgtttagtgctaccatgtttgaatcacagcttcctaacagctacattggttatttccccaaacattaaaattcaatgtgtgacagctctaaaagataagagtcagcatgtttccttccctctttatgcacacttgcttcttcatttctagttcttttcatgtgccctagacttttcttactttaaactgatagggaattattttagaattctcacaagagaaaatgcaatttcgaccttttgacttagtcatttatactctcagagtttatgataaaattatattacagatatacacagtagattatctagaaggatgttcaacactgtttatattagtaaaaaatggaaaactatcaagaggtacaaccataggttctgaatgtttggcagttctataaaatgaaacactatggatccattgaagatgatgttgagaatattatttaatggcatggaaagacaccacatgacaaaattcaattccaaattactgagtagtttgtgatcttactctataaaaaataactaaccatatatatccccgtttatgcatgtgcatacataaagaagaatattaaaatgcagatgcaagatttaatagcagtttcttcttgtgatgggattgtgacttatttttatttcgaatatttggtttatatgaactttctagaatgaatatgtattactatttaagataagaaagaaattcttcaactgctaagcatatctaatatactggatcccaaggtctggaaatgtggctgcttggagactgtaactcagcactcccgcctagtgggccccggagtgacttcatttccttagggccttttacataacctgggctcccctttgatcatcatattccataatggttgaggcctgagaatctctatgttgaaggtttcacaggtgattctgatgagcagccagttttaacacttcatgtactagtgttttcctgtctcctgatcctcccactctcccctcttttcaggtagagtgtctggatcattcatctaaacctattaactaggagtacgtttgtggccactcagattgtggtctcttaatactgtttttaactaaaaaagacaaggaatcattgaagaatagaagattttaggcctgggacaaatcatatgcaagatgaaccttgtgtatcttgtgtggctatcttatttgaaagctagtggagattatgaaatcagaagggacatacttgaaggacacaggggctaatgaagattcagtgtcccaagatgggataatccaagatgaaaacaagtgtaatctaagacaaaaaagttattgaagacttaacaagtcataattttgctaaaaaacccaaatacattagaaactcctggaaataactagagccctaaaatcaaactcaggaaattgataattaaaaaaataaaataagggtttatctagcttttcctgtaagaattctatttcaaggtaaccaaatagccctagtagttgaggaaaatttttctttacagagaagtttcagacaataattggagatgcattgcgaaattagatattcaccattttgcaagtcctactttattctgccaacagatataaatagatgaaacaattagatgaaagtgaatgggttgatataagtgaagggaatctggctgatgccatgtgatcaatcttaggatcagtggaagtgggacaaccagctagttacacattatttataattgaatctgggggatggttactcattatacaactctctgtacttctgtgtactcatcaaaggatcaaaggaaaagttctttctagcatgtgtgtgtgtgtgagagagataaataaatgggaggatattaaaccattgactttggggttatctgttacactggatggaaatctttaccaaacaaaaatgtacaaggtatctcagcctctacaaagtggtacagctccctgccaataggaaaacaagctcaacgctgcaccaaaaggacatctagttgtctatttggcccatttctaagttgtggctatttttttacactccattccctgcccccccccttataaataatcaaaacggttttcatttgtttgtttttgagacggagtcttgctctgttgtaacccaggctggagtcctgtggtgtgatctcggctcactgcaacctctgcgtcctgggctcaagcgattctcctgcctcagcctccggagtagctgggagtacaggcgcctgcaaccatgcccggctaacttttgtatttttagtagagacaggatttcgacctgttggccaggatggtctgaaactcctgacttcaaggtgatccctctgcctcggcctcccaaagtgctggattacaggcgttaaacactgcacctagcccacaaaggtttcgttttgttttgttttgttttgttttaatcacagaaaaatgctattttcatccagatgaaacatggccttattttttacatagttccaatgagactgttaattaaccagataggcctgcttgagtttgctttacaaatctatagccatataatttgacccagataattaattctgcctgagatttttttttaaggaatcttagatttgacttttaaaagcctttattatttgcttttctttctcaaagctcgggaaacaattccaagacattctctccaccatattttgcctgcactgtatatataaattgggatgaattcctttcttcttgaagttctcaggaacaggactctaatagccaggtagtaaacctgatttgtccactgggcttcgtaggcactagctacgtgtctcgtcagttttccggactagcgtgccgctgtgtttgatgaagtgagatttattctcatatataattctccatgtgtatcctttgttgcataatcaatttgttcaattgtatcctggtaagatgagaacaaatcctaattgaacctatgttaataactatgttctcatgaaaaagtaaggagaatcagtaaaagtatttctttctgcctttcgaaggatgctaaaaatcagatactacttacagttttttaaattttatatgcaaaagcagctggtggctcacgcctgtaatcccagccctttgggaggccaaggcgggctgatcacgaggtcaagagatcgagaccatcctggccaacatggtgaaacctcgtctctactaaaaatacaaaaattagctgggtgtggtggtggtgcacctgtagtcccaggtactcgggaggctgaggcaggagaatccactgaacctggaaggtggaggtggcagtgagccgagatcatgccactgcactccagcctggtgacagagcaagactctgtcttaaaaaaaaaaaaaattatatacaaaagcaatagtctattatatccaaagtgatactgatgaagaagaaagagaacttcatatatccataaaaattaacattaaatgcaatactaaaaacattcaaaataagtagccataatttaactcatcagttcatttgttcttgtgtaattaattgttattttttggatcttgggttaggtgctagtttcatgaagaacatctatttccagactaaaataagtcctggaaattctgattcattccctggtacagtctgaaagttgttgagctgatgtcagctctaacgccagtacccaagagtctattctttgaagtatcagtagttcagagtatctggcacactcctttctgagaagtctggaaacaggagtatacgctgaagatacaaccccaggcctgtggtttatagcacagttctcaggcaagcatcagatggagacagaaaccagtttgatactaataaaaggctggattaattactacagtgaccagcaatatcagaatgacgagtgtaaaataaccctttgtgacacagtgtatgactattttataagagtttgatcaatgtttctccggagagtaagaacatatatataatggacagcatgggctctgatgactctccttggtcttcccataaaatgttcgattagtaacagatttctgtgcataacatttcatgtacacaaactgaacccagggaaggctgagcgtccttctgatttgacagctcattccatagctcttctgtagtggggaggtgattaagaaatacaaaacccttgaaacaaacctaaggctttccagctcctctctccagggagcctgtgggagattttaaagccagttttaagtataaagtatattgttgaatttttatggtctatatttttaaattttagatctgatcatggggctggggggaaattaaagtagttgtcagagtagacttggtcgtttggctataataaaatcctaggtgcctttaattatcgatttaatcaaattaacaagtgttcaaaaataattgttggtaaatgtaatatgattgcagggaatcttggttcattcacaagtgaggaaactttgcctttcataattgtagatttttattttctaacactatgctagaatcaacacaaagcagagattattctggtgggttataaaatctctgctttctggtcatatcacacaaaagggaaaaatagtatttttactatgccttggtaagaattctaagatgaatttattaattcaactaagaaaaagactacttttaattttgcattaatgcattggaaatataggttttatgagatcattttcccccttaatttatctcacaaataagccaatcaaaattaggtgaattttaatatattttatagcttcttttcagacataggtgttataaacaaaagcagttaaaattcacttccctcaaattttccacaacttgctgtgttctctcaagttttatctttcacggtgtcatttcatatactggtacaaaacaacactttgctttagggaaaaaataccctattcttttcattcttgaaaaagaaagctcatcccattactttggataaatcgttgtatttttctgttactgtttcttctatttaagtctcagccaccaaatccgattataacttgtattcaaaataagatctttgatttcacaaagaaactggaaagtcataataggagagctgtgtgtcaaacacaaacattttagcagactaacaaagctataaatatatatagtacaatttttagagctacaggctcctaaagtagcaaaactaaaacaattaatgtgactcaaaaatatagccattctatagtatgtataactaaagggccaaaaatatgtaaactaaatattatgtctgtttatcattgcttttgttttcagccttaatacaaattacctagctgtctgaagatcaatccatgtttgcaagttatatataaagatataagaacctactacagaaaaacttgccagaattattattctatttagtcagctaaaaatgtatatttttcaaaaaactttaaaattatgtcactgtaatgcaagattttgtgattgaaaaatagtttgagaagtacgagaagttcggattaagtacgcttttcctgggaaaccaaaccccaacctgttaaaatgtaaaatagaaaccttatcacatatttaacactgaaaaatgagagaaaagtttttcctttcttaaacccaaattattaaaactgttccattgtccaaagattcaccatatgtatgtgattggatttctgagcaagcagtttctataagaggagatttttccctaaaaatctagaacacttgaagtactcagagtttgctttattttctgtgaattttgccggtattccatttgtatatgtcattatttatttttcttcaacaaccaaaatctattttttgtggttctggaggccaaatgtccaagatcaaggtgttgtaggtttgctttctttctaggcatgtctctttggtgtacagatggccgtcttctccgtttcctctcacggggtttcctctacataccctcttgtctggtgtgtaaatttcctcttcctataaggacagtagtcagattgcatgagggctcacccgaaagacctcattataattaatcaaatacagttggattaggaggtgctgggggttagagcttcaacataggaattttgacgtaattcagcctgcaacaagcagggaaacatttcacacaacggaggcaacagcttttgtgaattacagatatgtagacgcaaagccatgtagagaatttatagcttcagtcctacaacttcagtcatgcgtcaaaagaagatagagaatcacaaaaatgtattagtccagacctcaaagagctgttttcctccccagtgggcatatgatttttaattgatctgaggtcaccaagagataagtaaacacaagtgacttacacatagtctctgttgtctcttattcaacaaagaataaagctgtgtcatccaggtccagagattgccagtcagactatcaaggcaattcccaatcactgtgaccaccaaagggaaatagattattgtgagtctgtgctccaagcaaaaccaaacacacaaattcagaaaagaaaaaggggaaaaagtggagaaccccggttgcagatttcaagatctgtctgacttcaggaactattccttagtatattagtccatgaggcaaacttcctggaaatgaaggttatttggtccatttgagcgtgacctctaaaaccattaaattataatttccagtaaggtaaaatagctgttttgctattttatattatattatattagatattatattagatataaaatgtacaagtgtcaaaaattttcttcaacctattacttaatgtgagaagcagcaagctgtataaattggttcaaaaggctttggaaaaattagtgtcttgattatagataggtaaatatgcaatttaataaagagatgttagcataagattgctagactagatacaaatcttgtcaagtgtttacagggcaataaaccataatatttgaggttgtctgctccactggacagaaattctttgtatttccactggaaaaaagtgaaccactgctcctaccgagttgtaaaatagcccatataataaacctacatcgcattgaaagagtaccagtaatctctttggtttaattctaagtttcaaattttttttgattattaagagaatgaaactaaaatagtcctatttaatatgtaaaatgttttggtaaatatactttgctccctgcaaccattacatcaccagagagatacaatattttacgctcaagagaataataagtatttccctttcttctaacagtttgtgaaacatttacacttacattatctcttagggccataattatcattccttcttttatggagaactgagagtaaagatgaaattgttggccaaactgtcatagctaaaagatattgaggctaagattggaaccactgtcttttgattcaaaattccatattctttgaattagatcaaagtgtttatgtgtacttgattagattcattagagtcatcatgatttggaagaatcaacattaattccatataccctgatgcaaaaacaaccacttcaccccaagctcttccaaaaatctttttttatttttttggtaaaatctttgagtaatggtttcccaaataaagagatgtctactttccatggcctgttcatttggcgtgaatgcatatacctgttgacaggacatacataactgacagaaaaaataattttgacagtgtttggagctactcaatgagaaactttatataataatttgaatttgtcaagaagttctataatccttttatatatttttaaacacaattttgtgaacttgggtttccaaactatcttagacccatttctaaagctttttttttccctgtcaaattagttccaggtgaggaaagagcatattgtgtatctccatctctgtactttaatacagaataagattgaatgtgcccagccctagaccacaacctggcttcttactcatcacctccctgggaattccatcaaaatgcaatcagtgatccattcaaaatggcctcttgaatttaaggtacactgatgttgtagaatgttaatattcgtaaccacttagctgctgaaccagacaaaacagaatgacaaatctagcaatgcagttactgttgtttacattctgcttgttaggttgcattacaaaattggatgccaagtatataccaagtgtttctaaagagcaactgtttttcctcagtgtttctatggtttacaataattggtccaaagggagctatctggttttatgtgtttttactcagctgtttgacagttgttgcccataactgcaaattattgatagattgatggcaccatatattcgtgaattacatccacagtccttcatgattggaaggaaacagtaattcttgaaaagatggaaacaaaacatttctctaaggaataatatctaatttgcattgaataattagctcatcatctttcttttccctaagaactcactgagatgtgggatttgatgctagtcaaaaatctccattatcctccttatagacacaatgaggttacactaaaatatgcatattaatttttgcattctttgtagatcttcagcaaacttatctttgaaagtctttgaagatagtagctaatttaaacaaactgagtactatgtactagaaacctctattaaactcgtattaaatgtacctgttatactgatacttcacactgacagataaaatttcaatgacttttttttcaaatgatcaacctgtgttaaaaccaagttttaatacgtttatacttgaagcatttttgtgtgtgtgatgttaagcttggaacaatattcccctttttctcttttgttaactaggagagcatgctgaagagctgtcattgataagtccttgaatgtaatttgatggcttcttattaacccttggagtctgtgactgctatacaacttcttagttctaaatgcaaaaatttatatcccctcatgaccttccagcaacagcagaatgtgattttgtaagacattagcataatggaaccttttcaataaaatgataaattgagcccatctcaagaaaacagaacacacactggtaatttattgcggtcattgccatgtggaggaccccattcatagcatatgcttttagctctgatgagaacagtgctgttcttcagatcctacaagtctgcaagattggctgataaatgtttttttttttttaaggaaccaacagctctttgggtaataggcatcattacatgacataattatctcacaaacatgtctaattattctattgttttcaaggctctttcatgtaaatgtaagtgttgaatataattccagaatgtacagacccctttgtccttaccatgaagatgcagttttctacggtaataaggttgattgccattttgcaacagaaggcgaaaatgcagtccagaaactaaatatgttggggcaaagaggagctgcctctctgtaggtgtaaagcctgcaacaggtgagggtagacatgagtcatttttgtccagatgtacctcaaagttgtttcactgccagatgttgatggcatttgttgctgtgagtagtttcctttaatttagcagataattgtgaaaatgttatcaaaatatttttgcatgagttaatagttgattgttgttcaagaggcatttacatctaggaggcaactctttgtgtatgtattcccactaaatggtttatgtacttaggtacattttacttgggaaggatccatttagaaaataaaggaacacattacttcaatagcatatgtcgctctgactactaagaggttcatgttaggcagtctgctttctgtatgaactgagcaactttctcagtttctggcctgcattttctgccattggaaaaaggtaaccaaccttaacactgtggaaaactgcattttcctggtggggacaaagggacccgcacctcctggattctatacttagaatgaggaatcacacatacaacagtgaaatgaggtcacccagtgtgtgcatgagtctttgtgtccatattttgctctgaataccaggaatgtcaaactcaatgtaaaacttggtggtaatttgtaggttgtgaaaaattttattttttcttctctctttatgcaatttcttattttaaaagtgtcttttgtggctccttaattttaaatgtgggagtttattttagaattatccatggaatgtgttgtaattgaataaataaagtagtttgaaatatggactgataaattatataggtgcttgttgggggtggggggaagccaggaaattcagcttcttttaaattccttctagaaggaattctactttactagaactaaagtgacttcatcaaagttgaagaaaacctggcatatctgtgttagagaatttgctgatataattgagaaaacactgagtttcatgattattactacatatagaattcaatagcctgtatatatatgttggatatcatcagacataatacatttctattaaaatataaacatttgtgtgatgaagcattcaaagtttaaaataaagaaacttagggtagcttatactcttgaataaagtagctttcatttaggatagggaaatacttaaagtgacaatgtttctttttttcccaccaaatcatgcctatcaatataagtagggataagacctagatattataatttgtcttaaaacactttaaccacttctcacttctcaatcacaacctctctaattcatttatctccataaaatgatcttatctctacttgaactcattacactttactcaattgctttatctagcaatttattatgccaattctatgtcttttttaataaagtaatgaatatctagatgcatttctcaaatactgtttgcgttagcagttatatattgtatccttaagatttggtgctatttacttacaataacattctttcacaaatctaaataatgtagaaaacctcttaaggaaatcaaaatccagttatattttcctacatgatagactaaaataataatgatgatgataacagtaattgtaaaggcatcataaaagacattagacagaattgcagtagaagaggaaaatgggtcagaataacttgttaagttttaatcaactttaacatacattttctaatttaaatttctaacattgaaaggaaatttaaaaagtcaactccaaatctgctttagagtaaaatggctaaagtgcctaggagagatggaggcagggcagttctatagtcttcaccacagtgattctttcaccttcttcaaaacatcattctagatgttttatgcttcacctttttatcagtgtatatgagtgaaaactcatcatatatgaaaaagaggcctccaaatgtgttgaactgaatggtactttggtaggtaactctactcttaagtattgatttatttccctctcttttctcagttttaatgggttcaccctaatgctttagcatttactcttcactgggatttggacgcaattatacagctacaggttgacttctatggtcttgattcccttgctgtgaataaggaggtaaacaatcagtatgatttttcaatgtacaggacaactttgcatggtgttattgttacttcctacaattaatatttctatatttattaaatatgcttctcccacaggcttcatttgctagcctaatttttcaaaatagaaataagttaattgcttctaatcagtaggtagccatgagacacatagcaatttttcgttaatatctctaaatttttcccaaatgatgaaattcctcttaaaagtaaaaacattgctgccagtccacacatagggcatgcgtgggaaggaaagaaggagactgagaaatgttggaaggtctgttctgtaacagcttttataccgcaagatgtcatttgcatagtcttcgaaaacacttattggatgatagaattaataatatactttcaaagatcttattttaaaaaatttttaattgtttttctctggctcctcatttgctcagagctgctggggagcttcccccgactccttgaaacaaaccttaatggcttggttagcaaagtgtcattcaaacctgagcgtaaaacctgccggttgggattattgacattcgtgaacaaatgcaaatgttataaatttcttaaccttcataaagatttactatgatgtgaccttggacctggccatagatctcatgagaacagtatggggaagtagtactcatgctgttatattaggaagataacttgtgaacacagactgaagccaacatctgggaggcctgggttattgttttatttttgttttggctttattgttttaagacagctaagttgtatagagtagtgattggaccaaaatattaaaaatataaaaatagtcgagcccactggaggccatgagaacacccgtttcagctggtggtcttggtggtcttctactcatgccattctccctaattagctttgcactgtaatgcctgggaatgggctgcaagcagaattctcaggaggcttttgctcttacgctgaacatagtcttgaactttctcacccatttgttctgggttctttccttttcatgggttctcctgacatgcagttgagacgctcctcaactcccacgaagccgagatgccgtgggagtggaagtgggttgtatcacagctctgcgctgcgttggatggctgactctgggcttgccgcttaaccatgccgggcctctatttaatcatctataaaatggaaaaaatgaaacctttacatcataaaataatatgtcttttagggatttatgctcaaatatcttgcattacaaaatagttaaagaggtttgtaggaatctataaaatgtaacaaaacagaaacaaattagagccaggaaaaatatagataaaatagaaaataaaatctggggagatgagtcggccaacctgcaagctgtgttcctgctcagtgagaaaggcttgtggacaaatgtagttccagttttccaggagatgagcttgccatagagacgtattactacataccatcaaatccatagtgtacttactatactaattgtattcagtgatttatctaaaatattacatttaagcatttccctccttctctgaagtgtacattcagagaagtatgctagcgttttctctggtcatttgttggatacttgtgcgcttcattttgtgcatcattaaggaaatgtcagtgatcatggtggtctccagtatcatagtaagtaaacccttctgtcactggtgcacagccacgaccagaggagacccccttcgggcactgcacacgtggcccgtgcctcggcatcatcctttgcttcctgctccacgtgccttgctgcccacacagctgtgcctggcacattgtacctccagtggctctgggcaatgtgtggggagtggacatttcagagtctactctgagtcttctttctgtttctctaaaccagaaaaacaacagaatattctaggtcacaaccaatgcagcagaatgaataaaagggtgaactttggggtcagccaggtagtgggtcctggcccagtcatctggcctcatagaaggccacttaactcccagggtcttggctccttttccagaaacaaggaatactaacgtcttccttgggtttttattttaagaattatgtatgtaagttgctttgtctaggcttgatcagaattagagcttatgtcttcattacaagctattaacatatttatgtatagtcacgtgtcacttaatgacaacatacttctgaaaaacacatggttagacaatcttcttgttgtgcaaacaacatagagtatacttacacaaatctagatggtatagcctactgcacacctgggctgtacggtgtagcctattgcccctagacaacaaacccatgcagcatgtttctgtactgaatactgcaggcaactgtaacacaatggagagtatttttgtatctaaacattaaaaagtagggtaaaatacaaaataccaccatatacacatgccatgattgatgcagatggggcacatgactgtatgttatagatttaaaataccaaacacatatacaagccatatggcaaagtatgacagttggtacaattgtaattattaacaactcattcattttgctgatgaggatattgagaggagtgcaactacaattcaggtttcctatttcttcctcatggcttctttgtaacctaccacgtgctctctacctggataatgtaatatgtgcgttcttgcgtgtatgtacagggacaaaggagatcctctggtccctggactgagactgcctgttttctttcccaccagatggccagtacgtatctgggagagataatgaaatgcaccctcctacctcacttttttttttttaaccaaatatctgatattaaaatatcagatatgcatttatgacagttcatgttcacagtgaaacaaagcaccctaaacccactgcctttttgaatccttttggtgactgcttgcttattgctaaaatgttcttccttaaaactgggatgccataagcatgcctcctttctccaccttctttttgtgattgacaggtaaggcagaacccaagaagtattttcaacaaacttatttctagccattcggctgcctttgttgttgataggtagagcacttctcattcctaacaaagttgttcagaggagcactgaggcattgcaaacatttaacagaccactggagataacatgaacaaagaaactttcaataatatgaagaagaaaagcaagaaatcattatgtaaattgtttcactttgtggttaagtggtggtggtggtgctgttttgttgttgtttttattcgcttcactgactctttttatgtactaggtcttgccctattgtttgcataaatttctttcatgatttaaaattctttttgttttctaataatcacatttttttccatgctaaatttatctttccaagtcataaaggagatgtgatgagagactaaggaacaaccaccagaactattctaacctcgtaaaaagcatttctcattaaaaaccctgtcaaataaaaaataaatctcaatttagtaagagtagacgttattagaaaggattattgcaggggcttagggatgggctattcgaatagtgggaggaggatgggtgcaatagaagaatgctctgaccataagatctgcaggcatctcaagggttaggcaaaaggggcttttcttttcttttcttttctttcttctttctctctccttccttccttccttccctccttctctctctctctctcccattctttctctctctttccttccttcctctcctttctttctctctctctctgtccctctctctctctttctttcttttttcgaaatggagtttctctcttgtcacccaggcggagtgcaatggtgcaatctcggctcactgcaacctctgcgtcccaggttcaagcgatgctcctgccttagcctcctgagtagctgggattacagtcatgtgccatcatgcccagttaattttttttttttttgtatttttagtagagatggagtttcaccatgttggccaggctggtttcaaactcctgacctccagtgatcggcccatctcggcctcccaaagtgctaggatacaggcgtgagccaccacaccaagcttgggctttcttttatacaggggaataaacaagctagtaagaactggtgtggaggagtggggtggaagaaagacatatgggatagtaaatgagagagggttttaccctagggccagcttcttctcaggagaggctctctgctggctggggttgaggtcagggttctgaggatagagagaaccttcaccaaatttaaccaataagcatttctgattcatcagtagggacaagcaatccagctaatcattgttgaggcaaaggataggaattggaagtctggccttgtcctatgtagtcaacgggtacaagtgatattaatgtcccttccagttccaagtgcagtttagtgctttgagaatattattcagagattcacttatagcagttacatttttaccagtgttaggtgacacatctaattcatatggggaaagggggacctggcagtaagctgtttttgatcacactgaagggtgaggagtttctttctttctttctttctttctttctttctttctttctttctttctttctttctttctttcttcctttcttccttccttccttccttccttccttccttccttccttccttccttcctttccttctttctttctttctctctctttctttccgtctttttctttctttcctccctcctttcctccctccctctctctctctttctttctttctttctttgagacagagtcttgctctgtcacccaggctagagtgcaatggtgcaatctcggctccctgcaacctccacctcccggcttcaagcagttctcctgcctcagccttccgagtagctgggattacaggcaccagccaccgcgctagtttttgtatttttttagtagagacagggtttcgccatgttggccaggctagtctcgaactcctgacctcatgatccacctgccttggcctcccaaagtgctgggattagaggcttcagccactgcgcccggccatgaggagtatttctttaattttcattgttttccaggggctcagacctcaggtaaaattcaatcttgacaatatgcattctttatatgtaatgttcgtagatagctataacatcatttgtccacaatatcagaatgacggaggcatgtcgtaagactcatttatgatagtgctgcaagtcacatagatattcaaacaatattaaacatcgcctccagataagaatattacctggctaaaaaacaataaggcaatgtaattattacacaactggaaacacactcagattcccagtttacctctcacagtagaacttttaaaagcaatctggacagtaggatttagtggtaagttttggttcttcatattttaaatttcaaaaaaacctcacataataaaagacaaatatcccttaagcctctcattcagctagtttcctttgtataagaaaaataacatactaatccttttataccatttttttcataaagttatattttattcacctaacactggtaaaaatgtcactgccataagagaatctctgaatactattcccaaagcactaaactgcacttggaactggaagggacattaatatcacttaccacccactgccagttgtttttccagatgaaaaaactggaggcacattgtgccgatgtgctgaagtccacatagcctgtttgtcatgctgtcatttctcccacaggacagctcttcaagtgataacacagacggtgtctgtcaccacagtctgccctctattcttggttctgcatctgcagattcaaccaatccataaaaaatacttggtggaaaagcagtaaaaaataacaataaatataaaacataatgcaaattttaaaataaatatgaaaagtattagcacagctcttaccttgtcataggtattacaagtcatctagagatgatttaaagtatacagtaggatgtgtgtaggctatatgcaaatactctgtcattttatatcaaggacttgagtgtctgcagaccgtcgtatccatgggcatcctggaaccaaccctcctcagatcctcagggacaactctatattatgttatataactaaattaaaacatatgacttgtgtcatttcttccctggtaaatcttttcaatgaaccaactgaatcaaaccttttagtatataaactgaactgaaataaatcaaaattcagaatcctaaagccagctcactggggcctggctccacttttcctcagttctgtctccccacctctgccccaactcagtgtggcccagccttgacatgatgccaggggcattctccctctgagtccaaaacattcttagttgcaaattgtcgtgtacctgttctcactttcccatagtatcctaacaacacattctctgcttttttcccccatcctatgttaggttcaatactatgattctgagctgcatctttttcttttcctcatagaatgtgtcaaaatcacatatttatttttgtcatcaactcttcagtatatgtcttagtccattttctgttgctataatagaataccacagtctggataatctgttaataaaataagtttattgggctcatgcttctagaagctggaaagtccaagagcatgccaccggcatctggtgagggccttcttgctgcctcacatggttagaggacaagagcatgcatgtccattcgtatctccttctcttcctatgaaaccaccagtcctatcagggtgtcccctctgcgatgacctcatctaatcctagttacctcccaaatgccccacttaaaattaatatatgagcttggggatgaagtttctaaccacatgaaatctggcggacacgtccagtatttcttgaatgtttaaataagtgagtgtattcaataaaatggcttccccaaaagtggaaaattttttcgttaattattttttaattgaccatctttgtctataaaatgaggaggaggttttttctcctcagatattagagtcattttaatggcttcacagtatttcactttccattaacataactgaggctattagtttttaatccaggtttttgcatttgtgacactgcatcagtgaacatcttgtatgtgcatatttgtatagcatttccttagaataagttccttcaatctgaattacgagatatgcattatcttggtgtattttcagtcaatacattccttaatgtatcatatagaaatacttgcatatgctttgctttaaaaatgtctatattttttctaggattcacatccaaataatagccaatattaatgaataacctttacatatagatattggagatgttttaaaaacctcttggagagttaatattgaaatgacaagatgtgcctctttttgcagtattcacatgactttttgtacacaagggtgactataggactctatcaatgggtttcttttagaagtctccatgtggtattattttactgtaaggaaatatagttgttcattagtgctcatggtgatatttgtgcaaaataaataaacacacttttatgctggtgtgtatttcctcttttactcaattatttaccatgacttttttttttacccaaacataagttttaaatattgatctctgttaatgagctgcatcagaaattctccaatctgtattaattaatatcctctaaagcctgtagtttacacaccacgctttgtgcagatactggcattaaacagtcctgtaacatataaatgcataggaggtcttggcgggattttttttcttacttgattaaggcagcccctgatcactgacaaacttgtcaaagcccctgtgatctaaagaccttgaataaagtcacagcagagagaagaaaaaatcacacaaagccttttgctaatattaaaatgtttgaagtgactggcttaatctcaaccttgaggcaaatcaatgatttcataccaagcggctgctccattatatgcctatcctcagaaaagtgaaaggaaaagcaattaatccaccacttctgaggaaaagggtccattttccctgacattcaactggccatttgataaactgagctatatttagtgaggaagatggggatgaacccccaggagttggggagtgaggaggaaaggtcgcctttctcctggtcatcatccttttacccctgcaaaggaaaggaaggcagcccctgcagaagaaggggacagtagccaggcatgggaggggagctgcaaaggccctgagcacatagccttcaacaggcactgcaggtcagcaacagtgccgtgagctaggctcagaaaataggagtcaggagatgcagaaattgtcaggctagccaaatccctatgtggctgctcataccctacatacccctcgtttcgcataatcttgagataaagcctctctccctgttctgggaaagtgataccttattctgacactatgttagaaattggctttccaagggctgtgaaattaacctccctgagaggttaaggggtatggaagtggtcacagtgacagacccccatctctaggtgacaggtgatgacactatgatactgtggacacagcagccttaacccagccaggcccttattagtgaggtggggccagagaaattacagagcactgcatttccttagttttccttctgtcttctctgggagagattgccttgtttaattcatatatatttttctctctctgggatgtagttaatcatttgggacagcggatcaggtggttaaattaggcttcctgatttgggaatgaataggtaactctctaatttcacaataccaaaacctcagcatattcggtattaacctattgaatgggattaccacacaagtatgattttcctaggaccgtgctatgtgtatggctgttattttcccaaatgatcaaattgtgatatttcactgtcctagatacagatccagcaggcagctgatactgtctgctctgtctttccaggattccctctcacaccttatcactttgttgcagttctcagtataaataaaatgcagttcctcatctgaagagattttggggagttagggaacaccactgttaaattttttcccaatgacttcttacccatttaaaaagtatgcttatctatttaggcataactgaacttcacattctctgaaatcaatttgtaattacaaacactatttataacactgggacaataaatttggttttccctttcagaaagtaaattttctttataaacattgagaaatgttagtatttcagtttacatggagggtgatcaggagggttggcttctgtattagggaggatctctcagctctctgaaatattttctttggaaactaactgagtttagaggagagagagaaggagagggagaaaggaaaaggagagagagagggaggcatatttatctgaggtttccagtgaggagcgaatttcctcttaatttctgagaaagctgataagctatctatggaatgccttcagcacctccagcatttgtcgtacaggaaccatcagtccaatgaatttacatcacattggggagacaggtgtctgaacccacgatgttactttgaaatattttttatgagatagaaagaagatcagaaagctacaacagagattttaagttattttcagatgggcatgcatagaatttttataaagtactgctttaaagagccatggataccttctcttcactgtgacttggtttgcctggtgcaagataggagcagtcaattaacagagtttcttgtagaatgcaattcattggcatgacagcaaagcaagaatgggattctctccaggctgttattagatttctgtgaccctcctctattgttcacagttgtgtagattcctatcttcaagttatgtatgctgttctgtattagaacatgaaattgaagtcagtagatcagtcctaggggacacattgttctgactaacagtctctggtgagcattattcaaattgtgatcagagcaatcactaaatataagtggagcaagtgaggaagttggttatcagctgagtgccttcctcttcactcttcccctggatcctcccagacttcaagcccagcttgcctcttgcaggattatttcaaagagggtgtgcttcttcccacttgcttctagccaaggagctggcttggtatacagcaaatgcagccagctacatcctgctctgtgaaccgtcactgttgtcatacttcttggctcatgccaacagatagacacacttacagttaatttgagtattcactggctccatataggccaataatataaaaattgcttcagtaagatatgctcatgcatatatacatatgtaatgactacttgatttcaacctacaaccttgctattcaaagttatgtttatttgcacttcagtttacctttacaataatagaatataagaattgtctggtacccaggctgtgaaaagggatgcacattcaattatgtttccttcaataaaggaaagtttacggagtgcaggctctgtggcggagtggttctaagtactcagatgtaatggtgaaaacaacaggcaggattcctagcctcatggagctgaccttatagtgggaaagatggccagtaagcaagtaattaaattaatttgctatataatttgagctagttatgagtccatacagaaatgtcaaacagatcgaaaggatacaggtattggtcgtttgtacaaaaacagactatttctgaaaggcttctctaagtcgagtgctggatagattgagggaactagctgtgcaatgttgagaggaacagtggaaaggaagagggaatggcaagtgccaaggccgagggcagatattgagtttggtgtatgtagatgtagagtggctggatctgggaatgaactggtgatctgggagaggggcaggggcagatgtgtgtaaagaatatgcataggtagccatcagcaggtgctgagcaaaggaataatgggctctaattcatgtttctaaaagaaaagcccagcctctgttggagaaatggctcaggcaggctgaaatggatgcaggtaatggattccaggtaagagcaggtgcttgcgtgggtgacgcttgtgtcattctgaaggtggtgagaggtggtctcattctggagtgatcttgatgataaaacctacagtatctgttgatggattagaagctgaatatgatggaaatagagaaattaaggatgaatcacagttacttgaacacctgggtgactgggggtgtttttgttgggatgggggagactaggcagaagcaggttttgttgaagaacaatcagggattctaatttgggcatagtaatttagagatggcaaggcagatgagtcagggagacaatttgctgtacaaatctgcagctcaaagctggaaacataaatttagcaaaaagcaaagggtagatacgtaagccataggactgagaagatcacttgagcagcgagtttggatagaaaacagaagtggtcccatagattgcgctgtggtaccttccatcatttagaggtgtacaaaagatccagcatacaacaccgcaaagcagcagctactggtggtgcatgtggaagcttgtggctaggctgatgttactgtgggttctattcttagtgatggtacttgagtccaaatatctggaaggattttgaaaaatcagaacagtgcaagattggagctctatttaaagacacctggaaataatgtttgtaaaccaatatgtaaagtgcaatattggactctgctaggcattaggtagagtcaattttcatgttttcgcctcattaaagtgaagatttttaataagctttgaatagctgtttgaagatatttataacttcaatcagctcacatatttatcagacattaatttcaaaccatttaacgatctttcagcaaagtgagatgagtgatcaatggactaagaactttttcccctaaatttcttgtttttcattttaatgaatcataactttatttttcaaattttaaatgagcattcacatttatacaggaaaggattagttctgggactctcattaccaatatttgtcatttttgaaggtggagagaagagtctctagtccctgtctgtacgtgtggttgaccaactgtaacatcggggacccacttatgctttgcatctaaaatgtagtgctccagatttctattttccacaaaatatactctaagaagtcaattccacagcccttatgatgaatttctcttttgaattttgaatttagtgattttgtggtttgtgcatttcagttgaaacacgtctctctaaagcatacctgcttcagtagaaataaagactaaaggcttctctcttattacgtggttcaatccctcttgtaatttgctttatgcccaggtccttgaatgagctcagcgtagtgaggtttctacaccttctatttggagaattctctctacgataaacattgtgtctgcacattcaccaccaaacatgagaaaatagccctcacaagaacacattgatgtcactcaggtcactaagtagttaagttttttttttttttttaatggaactactggtttttaaaatacaacatcctttgtccatctttttggacttcccccaaatttcaatagaggaacacaaccttagtgttttctgtccagaaggcatgcacgttttctgtatggacactagggatggtgagaatgcatttgccagctttgactaagtagctaacttcacttttgtttttatgtcacatagggcataagaatggtagaaggctagtgcatttttccctactatgtttttcaagtttaagagtgaggggaagagagtaagattaattaatgtcaaattagacctcagctttgtaccttcaggtagaggtcaagcacaaagtgaaaatcaacaccataatttcataatttgggactcacatatttgcgccatttctaaagtaaaacaagtgtttgtgggtgtcagatttattgatcattgagagagtctcttacatttaaactataattggatatgttttgggttttcaaaaaccatgattttcaggaactgtgttctaatggatatagatataaagggtagagagagaaaaaaaaagtagctaaattattccagataatgaaaagcaagataaaatttgcagtggtttggtttattacattaaggtgggggaaaaaaacccttattttcaaagtgttgcatagctaaaaatgaatgcaatagtcaatgagtaaagggtgtggatgttaagagaattaacacacacactaaaatttggactttattacagagaaatcataccaactacgtaaagatgtacatatgcggaagactgtatgcaagtcccatacgtatactaggatagttacgtaaagttaaatgtagatatatacactggttatccattgtgctcctcctgctgtatgacaagaagactgtgcatttgcaggagagccagccaggcagccagccggctgtcagcactttctggccggatcattagcgcagcaagagaatgaacttctgtgctcaggattaggatttcctcataagtagcagcatataccaaggaggggactggagccatgactgattttgaagaactgatttggcctgagccagtggctgaagcagcgagctgcccatgcctaggaattcttaggctcaagttaatcttgttatactcatggagtcttcgggcagttcacgacttcaaaagattgagatcagcctgaccaacacggtgaaaccccgtctctactaaaaatacaaaaaatagctgggcgtggtagcaggcgcctgtagtcccagctactcgggaggctgggacaggagaatcgcttgaacccaggaggcggagattgcagtaagccaagattgcagcactgcactccagcctggcaacagagcaaggctctctctacaaacaaacaaacaaacaaacaaaattcttggtgttcctcctgcacaaatccctcccaaatgtctttgcagaatttctcccaaattgcagtaatttgacccacatggctctgctcgtgaggactggtttcatgcttgttgtgggcctttcccattacagtgccattgtggaaggaggagccctagggcccctatccacagcacccaggaaggggtgcagcgcagccttggaggggagcactctctcctttctggtgcctgcgtgtctctctctctctctctgtatctgtctctgcctctgtcttgtctgcctgtctgtctcaaagcgcatagccctgattcttatttttctgcttttctcagtctctctttttttatgagtcttttctttcttagggtaagcactgactctttctccttaagttctttctaacctgcccagtttgatctaattttattattattattattattattattattattattaaacttattgatgccttctccctacctgtatgcaatagattcccctgggggatcattgcttccaactctttccatttgtatatacatatggtttcctaaacatatatgtttaggaaataaaataataaaataatagaagtataaatatataacaaaagtatatatatatatatatatacagccctacattaacagcagtcattttctgtagccagcagtttacattagttaataactatttcccaggtaaatccacattgtccttttatatgagatttccccatatatgttttctgaagttaaacacatcagctacatctactgtcaattttgttactgtgggttgatacaacaaaatctttggtcaaagcacatttattaagcctctgctgtgtgtacagcattggagttggctccatggagggtgcagagatgaggagctccaaggtgcatagtgttggggagatgtgcacagcagagatctcaggttctccaggtctctttggccacatcagtgtcaggttagtatgaaaaagaaggttagattaacttagaaatacttttcaaacttctgaagataccaaagagatgaaagaaggtatcccgatctctcagctttaaaaatagaccacaataacatgtaagcctgaatttctcaagttcaacaggtgctatggtttgaatatggtttcttctcacagaagctcctgttgagtcttggtcaccaatgtaggtgtgttggtttaaaggtggtgggaacttcgggaggtgcttgggtcataaggtatttacagtcatggatggattaatgccatctgacaagagtgggttcttacttttgagggactgtattagttactatgagagcaggttgttataaagttcggtcactctttgtgttttgtcttttgcacctgctcactcatagatgtgctctcaccacgtgttgctgtctaccatgttatgatgcagcccagacagggctgcccaatcttggacttcccagcctcaagaactgtgagctacataaatgttttcttgataaattacccagtctcaggtatactgttataaccacagaaaatgaaccaagacaacaggcctgtctctcccaagaacaccaggagtttcgggtaccactaacccagggcatctcagatgagtatggttttttataaaatttgatcagaaaatggctttgcactgtgtaaaactcttatagcagctcagagcaagatggcttgggccctggggattgcagcaacaaccttaattttttgccatgattttctccctagggcgtataatactagagtggctgggtcagggtgggtccgtgcccagaaagaggatgcagcagcatccaattccccaggcctacttccctcaagatagattccttccagaaggcctgcagcctctctgttaattccctttgattggcttctctcctccaactgggaaagtataaatgacggcacgcatcaagctttttctccaacttgtccttccccacatgcacattagtggatgtaaattcagtcttgggtcactttttgagggggatgcattctgagtagtccaccgttaggtgatcttggcattgtgtgaacatcatggagtggacttacacagacctgcatggtatagcctcgcacacacctaggctacatggtacagctgttgctcttaggctgcaaacctgtacagcacgtgaatggactgaatactacaggaaattataagacattggcaagtttttgtgtatctaaacatagaaaaagtacagtaaaaataccgtattgtaatgttataaaactaccactgtatatgcagtccattgttgaccagaacattgttaggcagttctgtaaactcagtgtatctatatgccaaatatagctcagcttggtcttagcttaaaccctactaagtcaaataaaatatcgttaagagataagaaaaggaaaaaaaaatctttttggggtatggaggagtatctatgaggggccatcgactcaaagcttattgtggtggtggaaggcacaaccaggagcttgagtgactaatttcagatgctgacaccacaccacgaacacagccaaatcagtctttgtagtccttcattccctgtcctttaaaaagggatacattggaataatagtaatatttatctcatatgattcctatctcatattacaaaacgacaacaacagctcttggaacattgttaatacacaatatcctaggtaggcaatgaaaagtcaacaaattttacaggtagagctgtgggaatgacatttcagggggaaaaaccaggacataagaaagagatacaaaggtaggaaaatgtgtagtgtatttgtagaaaggtatactgtgctgtttctggagcattatgtttgtgtgtgtgtgtgtgtgtgtgtgtgtgtgtgtgtgtgtgtgtgtgtgtcacgtgtctatttggaataagccaatatacacatacgtatagatgtcaatagatttaatcaagcattgatttaatttagtcaaataccagcctgtagaattcttcatcccaatttaattttgtttacaagcatatctaggagttccagcctgtcacaattactgcagtttatactgctgctactaatagtgctattagcagcactattattatgattaactgcctctactgagcttttattacatgctagctacatgccaagagtgtcaatcacatgaaattcttaaagtgccctcctattatggtcttctattcacaatatcaaagacttggaaccaacccaaatgtccaacaatgatagactggattaagaaaatgtggcacatatacaccatggaatactgtgcagccataaaaaatgatgagttcatgtcctttgtagggacatgtatgaaattggaaatcatcattctcagtaaactatcgcaaggacaaaaaaccaaacaccgcatgttctcactcataggtgggaattgaacaatgagatcacatggacgcaggaaggggaacatcacactctggggactattgtgcggtggggggaggggggagggatagcattaggagaaatacctaatgctaaatgatgagttaatgggtgcagcacaccagcatggcacatgtatacatatgacatatgtaactaacctgcacattgtgcacatgtaccctaaaacttaaagtataataataataaaataaaattaaaaaaaagaaaactaacagtgaggtgaagtaaaccagccacacgtattagtcattttttgctgtgtaataaattactactagtgcagtggctttaaacgacacccatttatgatctcacaatttctgtgagtcaggtcccgcatttcctcaggtctgacccgcagacattgtgagcagtgcttaactgcatcctccactcagggtctcacaaggatggatcaacgcattaattgggccatgttcctttctgcagtttgggattcatttttcacactgacatgattgttggcagaattcattccctgaagttgtaggactgaagtcctagctttcttgctggctgtcagccatggttgctttcagctccttgaggctcctgcaatgccctgacacgtgggactctcagcatgatagttcacatcttcaaagcggtcggaagctctatctccgtatcttcgtttccacaagatctggactgtttttctatgggagcttctctgattgggtcaggccgacccagggtatctccttttggattaattcaaaatcaaccgatttctgaccttttgcacatctacaaaaatcctttatctttggtatttaatataacctcctaataggaggatatctgatcatttttacaggtgccacctgcactcaaggcgagagggttacttacataggacatgtatattagggggctggaattttggggattatcatagaattctgcctcctatgttgtccaaagtggtaagagtaaaaggtcgttattcaaaccaaaaccaatgttttacctgtaaaacattgcattaaatctacttttatctttttcatcctttgcatcttatcctccaactggtacgtcatcttagaaagtgtattaactgttagataagattatgtatgattgaattagtgtctgaattctctatacctttaatgttctgttgattcttttgaaaatccttcctttttagagattatgtccttgtcaaacccagactgcaaagtggtaaagcaaagatttatcatctgacattttttccaattaatttgcatctgctgaaaatctttttctgaacttattgagttttacctgaatatttacatctcctctcttgtgcccactagtattctactgtaagcttcatacatttttcaatcatcttattttgagtaatgaaataaggccggagaagcatagtctatgtcaaattttggcttgggagactgaggtatttggctgacgattttggagcagttgagcctagctctggccataccactgtggcatcaatgggaatgttcagagttctctgctgctccaaatttaattgaagtctatgaattactgaataaagcatgcttatttgaagagtttaatagctttggtttaagatagcaaagtgagaaaccagggcttcaggaatatcttattactgttcatagtccagtaaatttcattcatcagccaggttactgtcacagcaatgacacatatactcagtgacaaacagaccagaccaattgaagaaggtctatttcattttgctgcaaattcagtgtcatcaactagcagcaaatgcaagatactgagctgggcactaggactgaggcgaacaaggaagaaaagaaataattccttacgcactaaatgaatacacatcatgggaagaaacataggcagaatatgcatttttgtgcattagtcttaaaaaagaaactattccagcaggaaccagtctttcacaccaaagcattctggtatcatgagggaagattttctaacaaggcatcagattggttacattaccattctccgctcttcactcatctaactctttgaaaataaacactcaccagagaatgggatagctggccaaagccatgcaggataatttagctcaatacattcacaatacatcccatttcaagaggagagtgaaaggatgaattgtaacgtttattgggaacttagtctctatatgcctgtttctttcactgcaaatccctgctgaaatccatgactccaaatttcagtcattcggtaagtgttgcctttttgagtacttttccctgacggctgcctgcccctccccttggctgcgccatgagtagaccattctgtgtccatgtggagttccgtttcctgacctctgccttgaacttgcatcttgacttttttttcgttgattgatttagtccctcttttaccttggttactggttgggtctctgatttgagaaactacctgttgggttatgctcactgcataggtgacagattcctttgtacctggtttgctgccctctgctttgtacttgaatcttcacttcttacccttgattgatttagtcactcttttacgtttatgttgaaaatttttcccccatgaactctggccttgctgggctcattcctgaagattccagactgtagttgcctgtttactcccttgtttgtttcttttgctatgccgaagctctttaattatgcaggtttaattaggtccctcttgtcaatttttgcttttgttgcaattccttttgaagacttaagcatacattctttaccaaggcctagaatgggaaggatattttctaggttttcttctaggatttttatagtttgaagtcttacattaagtctttaatccatcttgagttgatttttctgtatggtgataggtatttttctgtataggaatcaccatacagaaaaatgaactccaagatggattgtctttaatccatcttgaatttcattcttctgtatatctatagcctgttatcccagcaccatttattgaatagggagtcttttccccattgctgatgaaacaattttaatatatgagaggatatacacagattataggcaaataccacaccatgttatataaaggtgttgagcactgttggattttgctgtccataggaggtcttggagccaatcctttatgtatacaagggagcaactgtacatgcctggcaagggtattttattttatttactattctccaacatcattaaaggcaaatactattagccctatttcatatgtaaagaaactaatcatttaatctctaaaatgtatttactcatggaccgaagaatcaaatcaaggaaacactaatgaatctaaacaagtgttttaattgaagatacccatttgtgaaatggagaaggaaagatattatctccctgaagtatgtttttttttttttcctccatgctgcggaggaccattggatgatgcacaagttttttcatctttattttaaaactcaagtgcattttctacgtagtgttgccttttactgttcattctgaataaaaatcatctctggcagaaacaagatatagtatctatgcaaagatccagctggcctgagtttgtaatatgcagtttaatatagaaatgaaataaagccaataatgaacagtagaggaagcggaagagctacagtgcaggtggcttgtcagtttttattaatttttctagacagggagtcacctatgcagtattagataaagaagtgtttgacagatctctgaatccactgcgttctagtagattttgtgaaagtttctgtcagagcaagtgaagtctttggctgatttcttattttatttatttagttatttatttgggcaagaactctctctgttacccaggctggagtacagtggcaggatcatggctcaccgtagccttgacctactgggttcaagtgatttctcccacctcagcctgccaagtagctgggagtacaggtgcatgccaccatgaccagctaatttatttattaatttttattttttatgtaggtagagacagggtttctccatgttgcccgggctggtctcaaactcctgggctcaagtgatccacctttcttggcctctcaaagtgctgggatcacaggtgtgagccaccatgccgaggtgtgtaactaaacaggcatatggttggcaactgagaaacagaaaagaagtaagaagatggatgttctttaattcgctgccacggaggaacatgagtggaggcccatgtgcattatctaccaccccatttgtggcaccaggtcctcacatagggagcttcactgttaggttcccagcactgtctcaatgtcaccccacaaagtagggtgctttctactcctggaatgcttattttgtgtccactgaactgataccttagtctcatgaatcttttaatgaatggtttccatattttgctatgcatgcaatttccctggtaaacttaaaaattaataactaataaacgaataaataactcatgtccaatccccaaccccagataggtggatttgcacagaggcactccagaacaggcctcactgtttccagccccggctgccatgctcagcaggactctaggctgccacacacctcagggttctgccctctgcagcatgtactacacagtgctgggcttcccacacctagtgaacgagtcacgacagcctcctgatgtcatgactccagggcttggggcctctctcagcaggaacacaggctgcacacaggagttctccacccctgctgagccaccaccatcattcctgctgcccagtgtccttccccagaggggcttccgcagggagcggcctggtcagcaccgccttctggaaagcacctccatcacgctgctccccagcaagtgctcccagagactctaaagtttatgaactgtggtccttcctctggagggctgtggctggctgttgccacagcagcttagtcctctgaaaggcagacctgtcaccccggcgtgcagttctgtgctggagctgtgtgggacatgtctacctctcaatcgcaccctaaaccacctgtttcttttgcatagagatcctgccagaatgttttcccacacccctgctcacctcctacttagaagtcggatagattaaggattcctagatgctgttagcagggataaaggatagggaagaaaggtgaatattgcttacttattgagagacaaccccaagctggagccttaacaataccatgatagtgtttttgtctcccttgcgctaataggaattgtgcttctcagtagaatcttacatattcctctgattgatgtatttattaatactcttttaaaaatttaaaactgggcatggtggctcatgcctgtaatcctagaactttgggagggcgaggtgggcagatcacttgaggtcaggagttcgaaaccagcctgaccaacatggtgaaaccccatctctactaaaaatacacacacaaaaaattagctgggtgtggtggcacacgcctgtaatcccagctacttgggagggaggcagagtcaggagaatagcttgaatccgggaggtgggggttgcagtgagctgaggtagcaccattgcactccaggctgggcaacagagggagactgtgtctcaaacaaacagacaaataaacaaacaaaaaaatgtaagtagtgggaccaagtctgagaagccagagcagtaaggagaaggaacatgtggatgtgtgtgtttgtttttctgcttccttcttcctacccccacacagaggctgtagaaagggatgtggaaaccatgcatatcaggagagagactgaggggaacaaatgattgggccttggttcatgtagcacatggagaatgtgtcaagaggtgctttttacagtttttctgatatgaatcattttccttgattaaggagagattcttcgattgtagaatagctgcattagttgagcatatacatttatacaaggatactatatttgtctgtacaccgaaaatcttggtgtttgcaatatcaattaagtattaaagtagaactaagtctattgcaggcttcacctggtataattatcatgtcctaattattactgccagttaaattaaacctaataagaagtatcagtttcttccaaaaccctgattttacccccaaagtgattttccttacttcaaatacagaaccaaaagaaagatttcatttttaaatataattttgctggctgtcaaaatcattgtaatgcaacttggtctcatcatctcatgatgggctcactgtgtccgtgagtggctgttcatcaaagtgtcctggctgtgtggccgtgtggctttaacattaaagcccaatgatggagcttcccagacaccgtctgtgagagtctaactagatcacattcctgccgccagatggtttggacaggtgatcaaaccataggtcatttcctgaaaaagccaggcaaactgggttttttttttttttttttttttttttttgagacggagtctcgctctgtcgcccaggccggactgcggactgcagtggcgcaatctcggctcactgcaagctccgcttcccgggttcacgccattctcctgcctcagcctccggagtagctgggactacaggcgcccgccaccgcgcccggctaattttttgtatttttagtagagacggggtttcaccttgttagccaggatgatctcgatctcctgacctcatgatccacccgcctcggcctcccaaagtgctgggattacaggcgtgagccaccgcgcccggccgcaaactgggtttttaaaagaaggacttttcactgaaattagattgtttaattagtttggaaaatctagttagaaagtgaagatggcctttcagacaatgatagtgtttcctgcagatagtggctgcagctattccccatcctgtccatttgtccatttggggtccagaagggtttaagttcattgcccttcagttttcttgtgacagagtctcactgtgtagcgcaggctggagtgcagtggtgcgatcttgctcactgctacctctgcctcccgggtcccggttcaagcaattctcctgcctcagtctcccaagtagctgggattacaggcatgcaccaccatgccagctaatttttgtatttttagtagagatggggtttcaccatgttggccaagctagtcttgaactcctgacctcatgatccacccaccttgccctcccaaagtgctggtatcacaggtgtgagccaccgcccggcctgcccctcatttttatttcagttttgctcctgtattcagtgatgcccatcaaaagcttcatcctcaactccaaagccaattagatagaataaacaataatttcaatagtcttaatactattaaaataagactccatttcttaatgatgacacgaacatggtggctgtaatgtaaccttccctgcatgatgtggttaaatgaagatttataaccaatttacatttaatcttttgacaacattcatttagtatcaccagataacagaagctgagaaacatttagtttagaatcctgacactgtaaaaataattatcaaattgcatgtcattttaatgggcctggaagaacattcctcattatattgtcacagagattaagttattttaaggccagttgattgtgattttatcttttgcaagctgaaagacttttttataccacaccattagtttcaagtctagttatttggttcctccacataatatttaccgtttttattcatcaacaccagggagaatgcaataaaatgtagccttcaccttcaaaagaatctaaagcctggtaggagagataaaattatctatgggatattgtgagatagaatgtagcttacgacccctaagaatgatgcaactcaaatgtagtgggcatttagggggaggggatttacattaaatggaggaattaagtaagacttcctagaggaagtggtatttctgggcccaataaggttgcagatggggaagtaggatgaaataaggattcctagatgctgttagcagggataaaggatgaggaagaaaggtgaatatttattgcttacttattgagagacaactccaagctggagccttaacaatcttctctctcctcaaaaataagatcctaaagtataatttacaaaaggtaaaattataaagcaaatataaagtgaacacatgtaaaaatttttatttaatcttttaatgaatgagggacatcataagataccatgaccaattcagagagccttgagaaattagggatctatctttctatctatctatttatcaactaagaaatttccgccaggccacacattttgggtgttatctgtttcactggacagaaattatttgcatatgtactggataaaagtctgcaaatatacaggtaacttccctggaaccttcaatctgtgttaagaaggaattcattcccttagacctgtgttgcccaaatttggataaccactggacagaactggctgtttaaatttaaattaaacaaatgtaaataagatttaaaaatgaattccttagtttcaggaaccacctttcatgtgctcagagccacaggtaaccagtggctgccatccccaactacacagagagaaccatccaaccctgaagaaaggagaggaggcagtctgtgctgtggtttctgtcttgactctctagggaaaccacgattctgctgctcaaaacctaggatactggagatagaaaagatggtacagctgaaacaaagtgcgtgcaattggaagtcatagaactctgggtgttgaattggccccacctctaaacttcccttcccttccttcaggtgcctatttgtttgatctgttcccctttgaaggtcttcctgcagtgtctcctggcaccttggtgttcgtgtgtgtatgctgtacgtctgagacctgaaccaagctccagagagataggggatgtgtctggggtcactccctaacagcattgagccaacaccttttgatctagggtgcatggctgccttctggcctcctaagggtatgagtggatgcatctggatagaacacaggatcatgggaaagtgaagctagaataattccagaataggacatcaaagaactttcaatataagactctattacttcttactattcatatgtgtgtgtgtgtgtgtgtgtgtgtgtgtgtgtgtgtgtgtgtgtgtgtgtgtgtatggtttttttttggaaatatttttactatagtaataattctacaaaatatacattttttttatttttttaaggcagggtgtcattctgtagcccaggctgaagtgcagtgacaccatgttagctcactgcagccttgacctcccaggctcaagcaattctcccacctcagcctcctagctattcctagctggaggtacaggcatgtgccaccatattcagctatttttttgtttattttttgtagagatgaagtctcactgtgctgcccaggctgatctcgaactcctgagctcaagctcaacttgtctcagcctcccaaactgctgggatgacaggcatgagccactgtgcccagcatcgttttactattgtgagcatgctaggctccttcccagttgtgtatgcattgtgaaatacccttcacggtgtttcggaatacatctcagtgttattctaggatttgaaaactgttaaagggaggcttgtcttgattgtttcattattttctcacaaactactagtgttgagtccatgagatttcccccaatatttattgttaacattattgatagatggcatcttgataggtttttaatattcttctgtttctttaggaccaccaccccactttctaaccatcattctcccttttcccaaacaacccaatcctttttgcagacaagattaaagtacatttagaaagctagatactgactgataaattatcaatttatatcttcattttttttcctattgactgctaatatagtcatgcaccacataaagacatacagtcaaggatggaccacatatataacaatggccccataagattttaattgagctaaaaagtttctatcacccagtcatatcatagccctcataatgtcacattaccttttctatgtttagatatgtttaggtatacaaatacttaccattgtgttacagttactgttacagttactgcctgcagtattcagtacagtaacatgctctacaggttcatagcctaggagcaataggctgtaccatagggcccagctgtgtactaggtgatgccatctaggtgtgtgtaagtacactctgatgtttgcacaattccacaatcgtctaaggacacatttctcagaatatatccctgttgttaaacaatgcctgactgtatataagcatgtttagatttctctaagtttaccttttatagaggcaatgaagaatacatgccggcctgtgactctgcagcattctcaaagcccgatgtttttcttctttaggcagagacaatatcaaaagtaaacagaaacattactgtaatctgtagcacaggccgagcaactttcctgtgtttttaaaatgttgagtttaagcgagctttcttaatctcaccaatttcttaattacttgatcattcacagggtttaatgtcttcctgggacaacattctttttggttgaaggtgggggtggggaatagaagtgagaccactgacatgaaacttgcccttgagaagcttcaaatctcgggggattgctgacttaaacaggtgaagtcactgcagaagatgggatagctcagcctgctacagacattcaacttgaagggaacttacagcaaggagtgtttagggtaggagagaggcggcccctgagtgaggtcttagatggattcctggaaaccttttgactgagatactcatgatatagaaagactttcatggtcccacagtaccagtgaagagtgtttcagctggagttattccagtgcagacttttagaacaatatgtaattcatagtcttatcagtcttgattaaaggaaaaaaataatctatgttttccccccagcatgatgacatcaccatgtgtttctaacttatcagtatgttactagagaaaaatatgtcttctcctcttttaagaggtagtagagattttatgaatctcaatcaccaccaaaagcttttggaaatcaatactagaaatgatccaaattttttaacattgaatgttttgtcttatttgttacaggtgaaataagatgcttaaagcatcgaaatttgtaagaggtttattttatgttagcagtgaagataggaaatattatatgtaaataaaatatttatacaaaactaattatattggctattgaagatgaacaaagaatgtgggagtttggaggctcacaccgtgttgctctactctcttaattaatgccattcctctgagggttcatttacgtaacaggtttttctaacacttagaatgtttttttaaaaaattttaaattattttttaaatagcaagaaaagtactacttctgtaaaaataaaaaagaaattgtattgattctcaggtcattccatggattccatttcttgggataacattcaatttgtagaacatgtgctaatctttgaaaatgagacttaattttcctcattggtaattgctgtacctgcacattcttactgaatgccagtgctttaaaacattaatgggaatttccatgaaactgttagcactgattgcatgagggatgtgggggtagtgagccagcacctgcagtggtgtttgtgactgctggcctgggtccataattgccgatctgtgtgtaagtgccactttgcaagagccatggaatcagtcccctacagtattttgtaaagtccaccgtctgactcaaggttattatcatgtggttaaaaggaaagcttgtgctttctaatgaggaaggcttacctgtaaatctctgatgaccccgagtgctgtcttggggacaccattcaacccattagcttgtgttttctttgttatgaaatgctgacaatcgtacctacctttcaaagaagagtggatgcaaatttaacaagtctgccattcatattaaattttgaaatacatattgaatcccctttagtaccattccacaaccatacaataaaaaaagcttttattttggaaatacttttttttaaagcatattagccaacttgaaaattttatcaactggactagatcatgtaattgtttattattttccttcctaacttttctgcagtccacccctgtatctcttacctcataataaaaaagtgattcacagaaacaaatatgattctagaaaaatttcaatcaattttgggactttccatcagggtttgtgttccataatattattaaatatttaattgtaaaggatttggttgggaatgaagtaattttaaaaagaattatttaagatttatatttcctctatttacaaaaatgcagtggatttaagatggaaatactgtctaagaatcaacatttattaaacaggaaagtagccacctgaggaagtaggaggggtaaatgcctacagcttgaagaatccgtgggaggagcttgagttcagaatttttttggcagcaaatacaaataaacaacatgtgctgaacattccatgtatagcagacattgttctaagtgcctcacctccattattatttttaaaatccttaccacagtctactgagttagatactattattgtctactgagacaataatagtagacatataattgcagatgagagaacaggcattgagggccagctgatttcccaaaggtgacaaggccaggccagggtttgacaaagaggtcatggctccagagaggtgctgcctctttattttattttattttattttattttttattattatactttaagttatagggtgcatgtgcacaacataccagtttgatacatatacatatgccatgttggtttgctgcacccatcaactcatcatttacattaggtatttctcctaatgctatccctcccccctctccccatcccacaacaggccccagtgtgtgatgttccccgccctgcatccaagtgttctcattgttcaattcccacctatgagtgagaacatgcagtgtttggttttctgtccttgtgatagtttgctgagaatgatggtttccagcttcatccacatccccacaaaggacatgaactcattcttttttatggctgcatagtattccacggtgtatatgtgccacattttcttaatccagtctatcattgatggatatttgggttggttccaagtctttgctagtgtgaatagtactgcaataagcaaacatgtgcgtgtgtctttattagcagcatgatttataatcctttgggtgtatatacccagtaatggcatggctgggtcaaatggtatttctagttctagatccttgaggaatcgctgcactgtcttccacaatggttgaactaatttacactcccaccagcaatgtaaaagcgttcctgtttctccacatcgtctccagcatctgttgttttctgactttttagtgattgccattctatctggcatgagatggtatctcattgtggttttgatttacatttctctgatgaccagtgacgatgagcattttttcatgtgtctgttggctgcatagctgtctgttctatggatgcatagaagtgtctgttcatatcctttgcccactttttgatggggttgcttgtttttttcatgtaaatttgtttgagttctttgtagattctgaatattagccttctgtcagataggtagattgcaaaaattttctcccattctgtaggttgtctgttcactctgatgatagtttctgctgtgcagaagctctttagtataatgagatcccatttgtcaattttggcttttgttgccattgcttttggtgtttcagtcatgaagtccttgcccatgcctgtgtcctgaatggcattgcctaggttttcttctagggtttttatggttttaggtctgacattttagtctttaatccatcttgatttaatttttgtataaggtgtaaggaagggatccagtttcagctttctacatatggctagccagttttcccataggtgctgcctctttaagccaagatggacataccccaggctatagagatgtcattgtgaggaaactggacacattatctgcagcattgatggtttcttccatctacatttatattatggagtttattcaacttttggaaagctgtgactttcctggcaccaccttaactgtgcccatttcctggcccgtatccatttctgaaagaaaaagcaactacatttactctttttggctttgtactttgttatttatttaaacctaattcttaaattttgcttcactctacagttttgtcttggtatgggaaatttcattattattttcaaaatgaaaaatgaaaaaataaattggcaacaacaaccaaaaaatcagaaaaaggtattagatttaatcagcagtttttgcctcagtaggtcaaattattgtgcagatacgttaatttaaaaccccagcaaaaatttgagaattaagttataacttttaagtgtagagtctccttagagattgctaagcatgttttagaagtattttttagaagtacattcactggatggatggttatgtaattggaagctgtttacaatatagcataaccttggttactccacaggagttaagtttatggctcgttaaaagcatggaacaggcagtttgattcagttgggtgtaataacctattggacaaggtttggagtgaagagtgttcatgtaataactgtcttcctttagaatagttctacttgttggtaaacttagaatttcactttttctccttaacattcagttacaccaagtcctatataaacatttttttattttagttcttatgtaagtaatttttctaatgtttaattttactgatttcaaatatgatatcccaacaatttaaagggtgtctggttggtaggaaagatgttctagatattgaatgatcatggctgcattctattttatatttgttgccctgacaccaccatgctcacttcagttttcaccccattaaaaatatgggagaatttattgacctagcaaatacctattgagtgtttattgagttcagggaacttcactagccatttggagcatatgaaatagagtgaagtgttacacacagagaggttgtatccatagaaaagtttggacaggtacagaaaggtcaaggtgagcgcattgagggccagtggtgtgcacatgaggtcccatgagccttcagaaggagagggaaggaagcgttcaactgaagagagtggtccactcacatagtgagacggaaagatgggcagacacggggccatgcgctgagtgggatgttaggacggtcaagtgaatcggttggctgcatgacctttccagagagtgctgactgtggctccctagagggagatttctagtgagataatgaagcctccgtgtttgacctgcccagtttagcaacttttcccccagtaacctgcataatggtgaaatggtcgttatccccatctttttcttttttggttggggggacagagtctcgctctgtcacccaggctggagtgcagtgatgggatctcagctcacttcagcgtccgtctcctgggttcaagcgattctcctgcctcagcctcccgagcagctgggactacaggggtccggccaccaagccggctaattttttgtatttttaatagagaaggggtttcatcgtgttagccaggatggtctggatctcctgaccttgtgatccgcctgcctcggcctcccaaagtgctgggattacaggcttgagtcactgcggcaggccgatccccatctttttaaggctccaaagcaaggtgtccttagaagaggtgattcaggaagtccagtccaaatgaatttcatgtggaaccactttggactatttctgtacatattggttaaactagaactaatgaataccttcactcaacatgaagaaaagtgggttctctctccataatgtgtaaagaagcgcttgctggacatcagaggtggtgctgattctgttcatttggtacatactggttgtgtccttgtggagacgtgtattccagcaaatgtggtcaagccctgctgaaggccagcacccagaaatacagtagcaataatcctgatggatgatgaggaagaaggttctgtgcccctgctgttacttctgaccagatccctgtcccgggtccagaaactctggccatgcatctattccacaggagaatccagggctccaccagaactgaggtgactccctgcatgactaggcgcagggctgaactgagggaatatggcaggtgtaactgaaaaatgagagctaatgacaccagcagcagcattcttgatgtgtaagaaacaaggacaactctgtagtcagaaggaggaaagagggaaggagctgaaaccaccaatagccaggcttggcaatgtggggggctttggacaaaggcttgggggacgcctcatgccagcagctccttatcagtagctggttctgtggtgttggtgcaagccagctgttcgaagaggatgagactgcactggctactttccttctcttagatgtcatttttagggaaatatcatatgataatggaaatcaagggcagaaatcatacaagaagtgccagtctaactgtaccttgagcatatgggtcagatttcaaaggtggtgatggaaatggagatggagccattgctgtccaggtgcgtctcaagaacagatccccttggtgtaggaaataagggcacatgatggcgagaaccttttctctgcttctagcactacggaagtcccccctgtttctgtcctaccccagtgccacgagtaaaaccttcttccttctccttctctcgggccaacattatttttatatgagcacagattaaaacaagctgtttcactgcccagtgagtctccgcgttgtcagttgaagaggggaccagccacaccagtggtttttattctcttcttctgtgctttctagtttggtagctgctacccacagacagctatttaaattgaaactactttaaattaataaaactcagagagtaattcctcactaagtttcaagttctccataggtagttgtagctaatggctacatatgctatgtacgtgtgtgtgtgtgtctgtgtgtgtatatattaatatgagatagtgcaaatggagaacattttcatcattgcagagagttctcttgggtgacattgttctacttaatattttaatagctcatgtgataaatatcacttaaaatccgtcctgttcctgctgttttgctctgttacaatatgttgatactgaacagtattttaccaaggtaagaaatatgttaaatcttactctctccccacctagaaaacaaattatcccagcaattaaattctcagtgacaactagtgatggaaacttctcaggttaatgaaaagtttccattagaatcagaacgactcttcctaagtatcctgtcttcaacccttaagcctattatctaaaatacataaaagaaaaatgataactgtaaagattatactggtttctaaaaaatcccaagcaaataaaatatactattttcaaatattggctctattcaatatgttgtaaacattgttatttcagcaacttttttgaccaagaaaagaaaggaaaagagaagatttgactgagggttctgttaggcaaagcgtgagagaaaactaaagaagaagatggacttggccgggcgtggtggctcatgcatgtaatcccagcactttgagaggctgaggtgggcagatcatgaggtcaagagatcaagaccatccaggccaacatggtgaaaccctgtctctactaaaaataccaaaattagctgggtgtggtggtgcacgcctgtagttccagctactcaggaggttgaggcaggagaatcacttgaacccaagaggaggaagttgcagtgagccgagattgtaccattccactccagtctgggcaacacagcgagactccatctcaaaaaagaaaaaagaaaaaaaaaaaagaagaagaagatggacttcttaggctaaggaatggtagaaagccagtggacctctgaatggccacggtgactcacgctttaaaagggccctgaactcagtacacttttctttttaacttctctgcaggaaaaaaaaaaaacaaaacttctgaataaaattaacatactttatttgcaaaatcattacataagtagacttaacctcctggcacatgacaaagtaattatatgagttcgttgatgttttgggttggaggaaagaacttggccgtaggcagatatccaggagaatttggtaaatctgggtttataaacatgagcagtttcactttctataaatcaagccctacaagtggattgaatccttcatctgatatttttttctaaattgtttttttctgagaagtacagtgtcacacgatgcagcattccaggaaggcatctatggtcaggagaagtttgagatgtcctgtgcttcatcctttcatttttacagagtcactcagctctgagaaggggtatggtcaggggacttgtttaatgtggcttcacttagcaccacctaaattggtttgacgagagaatccccaatattttttattgtcatcttttattagcttgcaaaccactgtcattttctgtaatgcctacttaaaatatacctgattagtctatgaatagaactacaaaataaccaaatcacttaaaaagctaaatggttttatatgaaaaacatccctagttttaggatgttgaagaatttagaggtgaagtagcatgatgtcagaaactgtgttacagatccttcaaccaaatagtttatacatgtagtatatgtgtacacagctatatgcacacacacgcgcacagggaacccaaacgtggcgaaatatctgcaagtgatgaattacaatgaaggatgtgatttgtacaatttttgaaatatctctctatgtttcaaaacttactatacaaaaagaggaaactcttatgaacacaaacataagctactttagttattgggataatcaagaagctgccatacagaagagttgattaggagagagaaaggattttaaggtccaagaacaagtgaaagggtgagattcatgctattgactagagacagctacataccacaagaaaggtttctcaggtcatttttggaattgccttgccattcctctaagagttatgactccatattcaagagtttctactttaggcccttcagccaggccgatgggaaccttgcccagaagattgtcggggtgttatttgttttcatgcctgtccaggtcacagcatgacacagaaaaccttgccaacttttaattgtgttatgtagctaaataaatagggaagccgttctggaggggctctcaagatttacctgatgccccagctgcttgaccaagtggagccaacagcttgaaaagcgctgcagccacgactggcctgaccttgatcttccttagactggctgttaatccccaacttgtggctgggtctggaaagcagtgtgtgtaatagattgcatgtcatcttgtatgcttctagggcacagacattggcatacagtattttctgaataacttctgaaggacttcagcgaaggtagtagcattcggaggtggaaaagttccttagctttcagattctgcgttgatatatcattagctgaaacaatattgcaaacatcactattgccttaagggagagagaagagtcacttagtttcctgcaatttctgagatgcttcttttaatattgtaaaactcttgctaatatgctctttcaacaatgctagcgtatttgcagccctgactcccctttcaaagcttttgcttttcctgttccttttcttcctccttttttctttttattgtttgacctttacaaaaggttataaaaattgtgaaattggatttgttcctgttgctgataaaggttttaacagtaaaggttcttcttctaagcacttcttcttctatgcacttcttagtgcacgtcagaattgtcacagttcttgtgatcttttgatactctgcatgttgcaaatatttatgttacaaatatttccattaacatttacttacatattacagatatttcagtcagttgttacaaatatttctataacattaatacatggttctatgctgcatgtatattacatgtgaaacattttatgtcattattatgtttgctaacagcaatgtcatatttatgtacttgaatatgttgtacattagggcattaaagttacacagaagtgtcagaaaatagtactttcacatcaatataaacatgtatttacattttatcttccatttcccactggaaactaaatattaatctttatagagtaataattataaaatatattgcaaacaaatgataaaaccatgaaactttacatctttgttgtgcttcagattttgcaaagtattgtcacctacagtattaggaaagatagctaaacaaatgataatccaatatgtctgcaaaagctctttttgtaaattcgggaaatgaagctgcaaaggactttagaatctcatttttttcattatttttgttctagttgtttttaatagatcatatgcatttgtgaggctgaagattttcattccaaatgttaaaaaaaaatatattatctctaggtgcctctgatgatcatagtaaaatttcaaagaaacttttatgtcatgatctgttatattatccacccaggtaaggattaaaagaaaaaactatttagtaattttcaaaatttagaaattcaggaagaaggttgtatttctggtaagtgcttctgaataaagttaattcttaacagatatggaagtataaattgattaaatttccctagtttacagagtgtccctatatggtgacagttgagagaaatgatctgagattgaactattgaattagttgtttgttcaccttttactcttgaaaatgtattatttgaatggtgtttgcctaggtagagagatcataaatgaaatgcaaaccatccatttctgcacatagctgcttggtctctgaaagttcctcagcgttggcctcttttcttattttatgtgtgactgtgagttagaaagtcaaccctagaagcccagcaaactgtgatcatatcatttatatcacgataaatgggctggtttttctctgtagatattatgaggaaaaatctgcagtcttcaaaactgtgtctggaagcacgagatagaattcaggagcatcctgaaagaattcctgtcatcttttcaaacttcctcggcaaagagtgcctctgattttactgtgttgcagatacacttgcccgattctcttggcagtaggctgcttactttgctgagtaagtcacagggctgttggcaagagagagaaaagatttcactcttggagcataaagttagattttctaaattaaattgttgtattcccattggaatatttattccagtaatgtttcaaaatgttcctgaagactgagttttaaaatttgcctctaacaagcttttaaagagtttcttgtctcaatttagatgcagcattattagccacttcttctgctttttcttctccagcaggtagatcaatctacaacagcttttatgtgtattgcaaaggcccctgtcaaagagtgcagccgggaaaactcagggtacagtgcagcacctgcaggcaggcaacgctcaccttgacccaggtaaggaaatgcagtgtcagcatgagactgccaggaaaatgaatgtgtactaacacattgcctttcagtttttctaatgatgtatcacccgtctttgaaaagaaaagacattctcttctgtggttgtgatagttaatgatagccgaagtttcgtttatgcgcctttgtcttctggatttctttctgctctgtgaaagtttagattacacagggttgtttccccattactttatccaggcctatgaaaggaagtatggagagtgctttggcagcaaaaagaggttgggcttctgttacggtgtgattagaagggaccatttaggaaccttaggctgctaaaaatgttttgtatcttgatctgtgtgatggtagcatggttatatacaaaagtcaacattcactgggctgttgcgttaagattggtgcaccaaatgtacgttataccttaattttaaaaagtaaaaaaagagtatggatcagcaaacagtatgcatataaagcaagggtcagtcaactgaagtctgctgtggccactgcttgtttctgtgcagcccctgacgcaaagttggtttttatggctttaaatggttgggaaaaatcaaaagatgaataacattatgtgacccatgaaatttacattctcatgtccataaataaagtttaatggagagccagccccacccatttctgtacatgttgcctacagctcctttcctgctttaagtgcagagtggagtagctgggaaacagactgggtggcctacaaagcctgcaatacatactcactggttctttagagaacaggtttgctgaccccgatagaaagtgtcaggttccggctcggtggctccaagggatttggctggatgtgatgtggttgcaatagagggcatgcaggccgagcgtgtccagtccccgcggtggagagaacacagacacgggggtgtcaaggacacagtgctgggggcagtcaggtgtgcaagtgtgggtaaataccccaggcaccagccaggaaccccagtgatgactggcatgttcagattctattctgcaagctgacggaaaccacagcaaaattgtataaaccagggtgatgtgtcaaacgctattgaggacagttcatgctgaggacagtttgccattagacttgaagatggggacaggtgaaagacaagaggctaattaaggcgcatttcatctggttcgcagatgaggagctgtgggccagggtcaaggtggcagccctgtagaatgggtgttacggggcctgtgaaagaactcaaaagatccacctaataaaggagaaatcatggatccatcttctcaggcctgagaaaatggtggaattacagaaagctgtgattcagtgtttcactttgatgaacatttcagctgtctagagaaattcatttatagagtcaaagccacacaagaatgatgcccacggggctctttctgggacagttcttgggcagctctcctgccgggcagcatgctgcaggcccaatgtccccaagaggggttgcttccacttgctcctctcctctggctttctcaacacaagacacaacctcatctaccccaatctgtgcctaagtcctgattgctttaggtggcatatatgacctatttataccaacttcctggtattcttggtaaaaatggcaataaaaatgaatattgaattccaagctaaattcttttcaggcattatctggtttaattatttcataagaacactctcagttaagcattattagtaaccctattttagatgtgaggataataaggcttaaagagattaaggcatttgcccaagaaaagaggaacttatgagtgtggacttggaggttgaacctggactgtctaatctaaacatttaactcctttagcttttcagctttttttttttttaacacacagatataattacgatagatgtcacatactcatatgtccacagtgatcactcaggtgatgagaagttaggttagatgtgggcagtagggggcggtgaggacagtagtggaagggtgaggtggaattcatgttgaaaagtcgcttctgccagttgctggcaagaggtgagagggaaactcagtatggctgtattgttttctttttaatcaaaagaaatcatcaatctggaattttacatgggatttctcatttaataatatgctttgtgtgggaaaaaaatagaaaaacagaaagaaaaccaacctgtagcattggcctaaacataacaagccaaaatagagtgttgtggggactaaatggtacattaatagtaggtacttaccagagcctgacatgtcgtaatcctcaggaacagtaaggcttggctgagaggtgatgacctgtgagcctaagaaatgctcacagcctcttgatgcagagcagtagaggtaggggtggttttacttctctgaaatcagttagccagagccagtctgccccattagaatcctgacttcctttgctcttacctatgccaacttggtaatatctattcaatggtacaatagtatctatttccttttgtgcagattagctcatttacgaagagtacttagaacagtagccagaacataaatatttagaaatgtaaaattctttattgttattctattaatattactattttatgtatgtatgtatatatatttatatatactcatgtatgaaatcaatctaggctttggctaactgatttcagagaagtaaaaccacccctacctctactgctctgcatcaagaggctgtgagcatttccatctcaggctgaggctctgtgatgatgtcatgccaccctgctccccaggcccagcatcctgggagggatgttcaatccctgtgttttgtagtctcggctccacctctatctccaaagcccagtcatgtgaccacctgggatttttctcagttcccagagatgctccacctttgatatttaaattcatgctgtttcttccccaagcactgttttctgctctgcatatcattgacccttctctgaagtttttctagagctgttggcctctcctctcttcatttcctacctgaggggccaaaatgtcaactccagtattgcaggtatcattcacttcctgcccttcattctaccaaagtgtccttacttgtctatgttcgaagagcctgtaagccttgttataagatcagataactttcagcttgggtctctagtttatgtttaacacctcacaaagtgccttgtccatagaaagacacgaatcaagtaatgctgaataaatagcatttgtattcgaaattttctatgttgactccatgaattcataccctttagaaattctgtctggcatcatataatgaaatgaagcatagcaattatgatggcttcactacagtgtactgatttccttccttatccttatattcttgtatttctatttttctccaattctcatccagtgtttttacaaagagactccatgaggttaagtaatgagcccaaagttacacagttcataaatatcgaagccaggagtgaaaaatctgctttgtatttttccatagccctggcctttactaggatatagtcctcactatacaaatctagtaatcagtgttctattttctaactacttcccttgtacttaaaatataactgaaacatactcttgaaaaaaatatgcttatggatttagggacaattaaatcaaagataacttatataatccatattttagtacagtaactagatctagtgtagctagtccataggagaagatcagatgtttcaatttttcaataacaaaaatacacattcagtaacacctacaaataatatttctgtggatcagccgaccagtcacactactgattcaccagcaaatttaggctttgcaataatggagtaggtgctaaactttgccaagtgtaaagattgctgtgtgaataataggcaattctgaggtttcattttctagaactttataaggatcgataacttacataattgtctctgatcaagaacaaaaatacaatataggatcttgtgtggctgactagttataggtgagcagcatgtggtttatgtgaacttcagcaagatttttatacctaaggaggaaaactggaacctggttagccacctgggttatttttgaaagtataattgtattttttctcatttggaaaaatcagtttgcaacgagatccactcatatcatgagtctaaatggtaatcttctaaagtttttattggtgatttgttcttaattctaacatttcctgaatgctatttaaaatttacatgtaataataatgagttgcttttcaaatgtgatgctccagtttaatcatgtttcacatttaatatgatactctaacaaattgtaaaggaaatggatagttaattttgtcctgatgttaggcatggggaactgatgtctgaagttttcacctgacctcataggtaagttgagaaccaacccggactcaaattttcttcatctccatatcagaatatcctctttcttgcatggtgaccttgatcagagtttggactagactataatcctttagaaatatgaatgcttactggaaaacggtgaacaatagctaattggcaagcattcacttttcatctgcttcttcaaaagtcatccactgaggtccatgcagaaatgagacagagttgaacacacaagggaggttgttttatatgtgcatatttaattctgattgggttcctgaccaatgaaattaataatttaaaataactcatgtcattgtttccttgaaatatttccctagcaccaatttatatcaacaaactttatcagagactgtattaatttttaattattttgactgggctggtaaggttaatttgactccatggcaatggtaagtctgtcccttggcatgatttgaaaaccaagcctcctccttcccctgaaggcttctcactaaatcctaacagtactctttctgatcatggctgaggagtcctgtcccttgctactatcattgtcttggccatagcccatatttcaactgacttgtgcctcctcaagaaagcaaagcccctgggataggaagtaactgactagtctttggaacagaaaattggcttaaaatatagtaaggctttttatagagtgaaatacttgattgactttaataataattagaagatagaattgacatagaagtgagctgagagcacatacagcatctggtcttgaaatattttcctgggagcaaaattctccaggactctagttctgattaaggttatgaattgctaatccctccaggacaaactctaggtaaccagagttatccaccattaacatctttttgtttgtactcagtttattggtcttaaaatgaatcagaagccaggagattactgtagccaagaactttgggtgaccccctccccgctacaatcaccgtaattactttatctcaaaaagaactttatctttgccactctaatgagatactctgccatggaatagcattaaagctaaaaggtttctgatgagaaatggtgcaataaatagagtaagatgtaaagtgcctggcatgatggattttgtttaaaattagtttatagattaggcacaatttatgtgaggaaatttattaagaaatacagtctaaatgtaaaatcattcctaagcttaatatttgttacagattaattgttggccaggagtcttcttacctctcttgttatcaaaattactctcacatttatgtaagaaattcaagtcttagaatagacctaagcttactttctagttttcacatggggtgtttttgcctaagtgtgtgatatcccctctttgcttattgtagatttggttatcaggcgtttcagtgctttgaaagcacagtggaggaggcattacgcattattttatgttattgacagtatttgtagggcatgttttggatgtcccgacagtgagagtggaaccggccaccatgcattctgttttgcatcgcgttacagtgttaaatctacagcgaagctggtttctgtgtggattcataagctccagggtggaaagtgtgcagaacacaatgcatgtctggcatctaccaaagccagggtggcccccgtgttcactgtcgcccttcacgccaccatctgttctgccacgagatttctcttggccttgtggacgcttcttacttcatctccttttcacgcccactctctttgcttgtgttctccttggtccttatcacgggctctcatccacacacaaatgatgcacactcacctcgcaaagagccagtcgatagagaagtgagaaaggttaaaatattttcctctttttcccttttaccaaagctaatacttccaaaagagccaggttaaggtaaaaataaacatataaaaaacatagtaaacatataaaaataaacatataaaaaaggattaccataaagaacttaaaattttgatgatttattttttatacatgtattattcttgatagtttacatttagaatttgcatactgtatacaatatatatgtaaaggggtctccttaaagacggttgatcgaaaccatttcagggcatcagtatcagccagtagaaggaatttaaaattgtaagtaaatgctgctactgccattttcttgagactcattttgataattcatgcctgggtttcaaacccgtaaatgttcttttccaccaacacacacctcatatggataccattgaattttctcacttactattttgctgatttttaccacatttactaatataaggaataatattgttttgaaacattcttttggaatttattcaagtatttttattgtattctgtatttgattattctcaaaatggtcaataatttcttagcagattttaatgaatgatcaatttgttgaaagttatgaaatacaggtgaattcatcttcttaagaacgttttcttctttaatatacttgtacgtctattgttataaatataacctaaacttcaaaattccatatgggaactcttggcttataccgatttctttctaatctctattttagttgtttttctgttactccagatttaaaaaacattttccaaatcattttctttgtttgttggtttaccaaaaatatgtttcttttaatcagcttttaggatcttctgtattttatattgaatttccaggacttttcaggttataggtgaacacctcttctcttcctaggagcattttagggatgttcattgtttatgcccctgctcccttctgcaacagctccaggcagttgtacactgaggggccaggaggggacctgaagagctcaggacaccaaagaccacactgtgcagttcataaataatcaaattttagaacttttgagtaaacgattaggtaagttggccagccagtgaatcagcctttggtgaatggattttcagcagccttcctagaaccaactcctacaaatggccataggacacacatgtataggtcacaaaagcttcatttgttcaaagacactaatttttaggaaaacatcagatcatttgaatggctctcaaagactcctccaatgtttagctgagggtctcatggagcagaggcatagttaagagaagaagaggatggaggggatagacgagttcagggaggagtgatagccgaaggtggactgagtaagtattttatcaaagtctatgtggggacctgggcaaaagccagagtgatgcacattcagctttggcgaagagggagaaacccagcattgatctgaaataagtaaaatggtatctagctgagctgccggcaattttagccaattcgttgttactcttctgtatcacagaaatgcgtacgttgagagcctttgtcctttgcctagtattttagaattaagattttatttatcatatgttattcattgggatgatgtcagttaattaaagtctagagaaatgtgggtcaatgttggtaattcattgacttttcaatccagctatttattttcatccagcccacagtagtgctagcctttcattgcttctttaatagagatccctctgtaatgataactgttttttgtttgtttggtaatgattttactcactactctttaagaaaaagggagacagaaaaagaagtcggtcttgcagacgcaagttccccaagtgtacctttagaatgctcaaaagctcagcatcatgaggaccctggagagatgggaacataccagatgtcgctttgcattttgttgtgtagagtgtctcagtgtttttgttttgatacccagccatgcgcttgacccatgctgctagtttgaaattctcaaaattgtgggcaggaagttaaaagcatattactctgaaaaagtatgtgtatatattttaaaacatgttacttattgcattacttccaaagtacatggttttgttgtatgtatactataaggagtgactactattatagtgagaacctgcttctacaaaaaatagaaaaaaaaaaattagctgggcgtggtagcatgtgcctgtaggcccaacaacttgggagaccgaggcaggtggatccattgagcctggaaagtcaagggtgcagtgagccatgatcatgccaccacattccagcctgagtgacagagcgagaccttatctaaaaaaaaaaaaaaaaaaaaaaaaaaaaatccctataatttattgaatgcttaccataaatcatgagctaagctcagactttacctaaatatttaattgttatgatatttgtatagtgctttttctaatttcacatatgcatatcattatggcaatgaggtacaccaagccagtattacttactttttatgtaaaagatattaaaagttttacaaagtctgtcagttagtagtgacatgcagtcattaatttagataattggaaattggttaagtgatctacaatcttattcattgtgcaggatgatacatttttaaaatatttataagagaaatatttcttgatactacatagaagggtttgagaaaactcaacctaaagtacctacaaagcataaaagaaaaaataaggttctctaaagaacgtttttcatatgtcttattgtttcattttacgttgtagttacatgtatgtatcatgtttaaaaacttggttggtttgtttattggttcgtgatgctgtctcctggcagggatcaggcactcacacagcagataaacccatcaggacattcttgttgactcacacactgacggggctgtttctagctttactagccactgtccttcatggcatagaacagagcatcaaggcatcaattctgtgtgcaaggcaggataacaacggacacagcagtgcctgtctcttctatataaaacagataattctggccgggcacggtggctcacacctgtaatcccagcactttgggaggccgaggtcggtggatcacttgaagtcaggagttcgagacgagcctcaccaacatggtgaaaacctgtctctactaaaaatacaaaaattagctggctgtggtggcatgtgcctataatcccagctactcaggaggctgaggcaggagaatcacttgaacccaggaggcagaggtttcagtgagccaagatggcactattgcactccagcttgggtgacagagtgaggctccgtctcaaaaataaataaatacataaaaataaacaaaatggaaaaagataattcttagaagcctcctaataggcctctccttacagctcatcatttataactgggccatatggccagtgatagtaacgaagcatgttgaaaagcaagtgtttgccacatggaaacagaattgccatgattggcttagaccagtcctattttatcccctagtctgggcccattccatctccaaaaaaaatcggattcctatgagcaaggacagagggtgagaagcacgttgggttggcaatgatcagcgactatcacatttgtaaatgcatcaccgttttagcccactttcctgaactcatcagtttctttcctgcgtggaaaccctgctgttctatgccctatttgtatcactttgcctgtactagacttggctagccttgaaactgtttttgtgtgtgaaatgctacttttctccagtgcctgtttctacacatagatgtaccttcctgagtctctgcagagtgaaactgacatattatccgtttgagcactgaggagctttatcaagacttgtggaagtaaaaactacatctgtagggcagtgggttaatttatgtgcttaagaagcgaatggctcaaaaatctcactggggaaacataaatagaatttagtagccttttcttcctacatagtagatcctttgttgatgctttataagaaacaaatatcttatcttacagtgataaaatgtgcggggcaggggagtctccctgaaaatactgcttcagaatgaggcaagccagtacagaccagtactgtgatatgagtttgcattatgaatgtatgcgtgcatgctcttccatctgggaatatccagctacctgcgtaaatgcatcagtaaagccgggtgggaaacggagaggttaattgactttacttgggtcacccggcgagaaagaaaccaaactgagagtttaatctggggaacttgagctcagattcttgctgaaagcactcacattgagtcacattagttttcttataaggttgagggagagttgacacttactctgcaggctttccctgaaaagagtaaaattcactggactctgttttctaaagtggggattaagattctagaactggattagaagtgaaacatggagttttcccttgctgaaaagaaaatggaagagtattgcgtactgggaaaaaggaaattatgaaaattaaaagggaaatgctcatagaatatgatttgtaaagtgactagttagccaagtgggtttgttgtagggcacgatactcactgatgccagagtctatggcatgcactgggcatggtccacttgaatctctgagtatgattaaaacccttcagtcatttgttggtatgattgaactacgggttctcccacggctagtttcaaagaattatatttctgtctagtgtcagaatgaccctattttttttaatgtgttatgaatcttcagttgtgcatacagaatttcatattaatttagaatgccatgctaataagcgtacactcagagatggccataatttaaagctagcagtagtatctcatggagaaatgaactctactcctcccataatgtgctacaaacaaatgagaaccatgctctttgtctttgtctctgaataggatatttttatttaaagtactttaggtaaaggtcagtataaaccaatatgacataatatgtctattgttcaatgttatcataaaaatataaactttgcataaacagagttcatgaaataaatggagtatgaccaaaaaattaagtcttgattatttgggtccccctgttctgggctcccttattagattcatttccttggggcagggaccatactttggtgcttagcatagtgcctgccacatagtagatatttttattcttattactattattattatttgatgtttaagatgtttcatgaagtaaattaatggtaggccaaggtatacaatgactatgataatgaatgatataatagtcattgtataccttggcctatccataatcttagaataggaatcaactttgcagtcatctaatctcaattccctcctatagaagataattagaataggaatcaactttgcagttgtctagtctcaattccctccgatataagatacttagaataggaatcaactttgcagttgtctaatctcaattccctcctatagaagataattagaataggaatcaactttgcagttgtctaatctcaattccctcctatagaatataattagaataggaatcaactttgcagtcatctaatctcaattccctcctatagaagataattagaataggaatcaactttgcagtcgtctaatctcaattccctcctatagaaggtaattagagtaggaatcaactctgcagtcgtctaatctcaattccctcctatagaagataattagaataggaatcaactttgcagtcgtctaatctcaattccctcctatagaagataattactcttacatgcttgctttgtagtcatctgactttgctagagcactttgagtaaaggaataatcattgcttttcacaaaactgttttcattgttaaagagcttgagagaaagttatctgacctaaatgtttccacccattcttctagttttgttatttaaaaaaaaaaaaaaaaacgaaatctaaggaatgttccacctgtaggctcttcaaatgtttaaagcagctacaatgatttacttcctagggctttccttctgtattaaacttacgattcaagcattaaaaagggacagagtattctcctgcctcaaagaagttttcttttcaaagaacagcgttggagccacgaaaggtatggcaagactatgaaagaagatcctgaaattagaaggtgaatgtgctcttaagtaggaccaggagattgctgttgggttgtggatagggcctatgtggacattgatccagtactgactgtagagaaggaaaaggcagagtgtacacagggccttctttgtggaatgatgttggtgttcaggttggagaatgaagaggcagggttggaaatgacaattcagagcgagcaggtgtggcagccactgtgtcagacactgagcttatcaccagggttggtcatagtgggacgtgttgagccactggaaatttcatgcctactggtgatttttgtaaagcagctcccggtatatctgtatgtctgctgataaagacatacccgagactgagcaatttacaaaagaaagaggtttattggatttacagttccacacggctggggaggcctcacacttctggtggaaggtgagaggcacgaaggagcaagtcatgtcttacatggatggtggcaggcaaaaagagagtttgcagggaactcctctttttaaaatgatcagatctcatgagactcattcactatcatgagaacagtgcaggaaaaacccacccccatagttcaagcacctctcactgggttcctcttatgacgtgggaattgtgggagttacaatttaagatgagatttgggtggggacacagccaaaccatattaatgtccaagacaaaccttttgtagcttcaactgcacaacccatcacgctgtatctggtggtggttccttttactgaggattcttttgtctcctctaaaggagtttccatgtcctcctggcagatagcatttttgttgaggccatggatgctgctgacacattctttggtaaatgtcatgttatattaatagattttctcccagggccaaatggataactttaagtttcaattacagctttatttcagtacatagtagtgtccagtctcttgaaaacaaccaactaaacaaataaaaagcttgccatgtactcctgctgggcctgcattaggctgggcacttgctggaggggtggtgtatattggggtggggggcatcctccgtccttccccaccttgaacttgctcccctgcactgccattttgctctcttctgtttctgatacctcagtgttgaagcacaatttaggagcttagcaagagggcacaggaaagttctcactcagctgacactgtcatgggatatgtttaagctgtcaagtgtaggaagtgtgaaaagcaaactttatctcattggctcctgtacaagttgtttagaggtcaccagaggaaatgtctgcttcacctccaagcatatactgatgttcctcctccggtgatcacttctttctcagctgctggtttttcactgttatccaccccgattttctctgttggagtctccttggtcttccaggacatcttgggtagaaactaaagtggtttcagtgcagctctttttcattttccattgggcattctcatacatattttgttttaacaaactctgggatcacagactaaacccaatataactataccaacaaagtagctagcctttaacattatcaagtgggactcgggtcagacctgaactcactctctgtattagtcctttcttgccttactgtaaagaagtacctgacactgggtaattttcaaagaaaaggagtttaattggctgatggttctccagcctgtacaggaagcatagtggcttatgcttctacagagacctcaggaagcttccagtcaccgcagaaggcaaaggagatgtgagatgttttacctgtccagagtgaggaggaggtgctacgcacttttaaacaaacggatcttgtgaaagctcactcaccatcccaagaacagcaccagagggatggcgctaagccactcatgagaaactgctcccaggatccaaccacctcccaccatgccccacctccaacactggagattacaattgaacatgagatttgggtggggacacagatccaaatcatatcactgtttctccttaactctagaagagccatatcaagctctctgagtggagtctttccatagaagcccttttcttccacaaagaaatcaccttcaaacattatctcaccttcaaacattatctccactcactccaacaaaccaatctataaatatgatgttcatgagatgtttcaaaatagcccatgtttggaagaaaaggatgtactttctgcttgatttggctttgagcctaaaactgctaaaaaaaaaaaaagtctgttaaaaaaattatgtcagtgatgtttagatttgtaaattcacataggcaatcagcacctcttttggtttatagtatctcttgtatctggctttaattgaaacctccaatttaatattctattacataagcttttcatgtagagccttttacagctcaaaaagtattttcacacacattgtctttattgatttaataaccatgtgaattgggtaaggttgggaatcctgtgactattttacacccaagaaaactatacaaggttcacagagaataagagaattaccaaaggaacagtgtgaggtgggctctcaaaccacatgttttgaaaaaaaaaatctaaagattttctccttctgctacatagcctcttctcttaacagggagctaaatatctttagttggtacatcattatttttaacactacttgctccgtagagtccctaaggcatttaaaatattttaaatgtgcaggatcactgtcatccttttcttctaagatgttcttatatttttctttgatttatgttttgaaggctccatctttgttgaggccatggatgccgctgacacatcctttggtaaatgtcatgttatagatgttccagccatctattaaattccatctcatggtatcaggataagaagagctgaaaattagctgaaatgtggacccttcgtaccacagagctgctgtcatttagactaagctgttactcactagtttttcctggagggaaaaagattttgaaatcacttataatgaaggacgcagataacaccggaacctcttgacctaaactcttgtccttcctgttgttttgtttccttcgacaacatgaaaaacatttaataatgactttgattactttatgtttaatttggagcagggtattcagccgtaagtttttgtttcctttatttggaaacctatgattttgaagaaggggtggcaggagagtgaattggcacaaatgttaggttctatatattactcaagtttatcatttagtggggggaaaaagtaagtttaccttgtacagcttgaaatttagtgggcatttattttcaaatggctatgcattgtattgaacttggaaaattaagatgagtttagaaaaaatatccataacattggaaaatgtgctgtggaatacatagtttaggtgaaatatgtactaaataatatcacaaatctaggaaaatgccagtatatatgttcagaagcagagcccaatacaagtttcataacgatgccacttttgtctttattagatgaggctttctttgttaagattagtcagaacagaagaccaaggcagtcaggagcacccccccacccttattttaagattacagttttgtgtataagagttttgaaataaatgcttcatttaggagacagaaactcgtattgttaaaaagtggagaaaattggtttactttaagtttctcaaaggtttatataccaaaacttctcaatattgcctggcctactccaaacatgcagatttcagaatctttaaagcacgtgtgaaatgtgcatctttaacttcagtggggatcagcaaaagggaagtcaaaggaggctggatgtattagtccgttctcacgctgctatgaagaaataccggagaccgggtcataataaagaaaacaggtttgactgactcacagttccgcatggctagggaggtctcaggaaacttacgatcatggtggaaggggaagcaacatgtccttctacacagggcagcaagagagagaagaaatgagaaccgcacgaagggagaagccccttataaaaccatcagatctcatgagaacttaatccctatcatgagactagcatgggtgaaatcgcccacatgattcagttacctcccaccaggtccctcctgtgaaacatggggattatgggaactaataattgggtggggacacagccaaaccatatcagcggggcaagcccaaatttgtaaatgttggaagtaatcaagagaaagagaggacagtggatgttttttacttcactagactctgcccttttgtgaagcctcctattatgcaatcagtaatttttgcttattgaatattggatttgattgattaaaaggacaaataaagtacaagatcctggatatgtacattaattagcaaaagttgatacagagctgtactgtccaatatgtcagccactaggcacatatgactttttaaattttcatgaattaaaattaaagaaaattaaatagtcagattatcagccacagtggccacatttcaaggactcactgggcagttgcaactagaggctgctgcattcattgtagtttagagcattcctgtcaacagaaaattctcttagatagcactagttcaggggattctccctggggcagtcaggtgcacctgtttggatttttagaactagtaagtgtatttttctaaaactaggaagaaagagctggaaaaaagttacttggctattgcataaatggggtgtatggtagggatcgaggggcggcatactgcggcaattcaagtgttagtaaagttttatggctattgagcccaaagcttagaaatcagacaggccttgccttggtcatgcagtcagcagtgacagatcagatctgggactaggaccaaggttgttagtttcccaacttatagttttatcaccatattgaattccttccaagatgtatactttggcatataattttggaaccacaaatctttgatttttataagacagagaggcttacagtctttccctccccataccaagacaggaggggaggtgactttcttacacagagaaacctacttcataggctgccatctgtcaaggacatctccttcaccttcttatcctcagagtgggtcagcaaggagacccaccagaagatgatgatggcagggaaacagctccatgtggcctgtgtgagttccctgtcagtagcagctgtctctcagatccctttgggctgcagcctgggttctgcagcagaagaactcccaatgccttacatgtctccttaggacctcatttgttctccatcctcttacatcttccctatctgaatagcagccaccttccaatgcatgtggttctcaatgtgagaacacattgggcctcccgacatttaaatgctgaaggtagcaccgtgcttctggacaggaatttatctgcttgagaccacatggttatggaaaatgttattttgtcaatgaaatgcaaatatacattaaccaagtatccttacatttatagaaattcttttttatcattatttcttcaaatcggcagaaaagcaccaaaaaaaagaaaaaaaggtgtcagaaatgacccaataataatgcattttagaagtaggtgaaaagcagttttcacaaaactttagtttacttgaacgtttcaaataatacaatagttatttagttgaaggttaaatttaagacagtgtgacaaagagatacaaaatgagcatatgctgttggaaaaatggtgccaatagacttgctctaagcaggcttgccacagaacatcaatttgtaaaaagggcaatatctgcaaattacaataaagtaaaagtgcaataaaatgaggtatgcccacacatgttttaataagagaaaaattcccgtgtactcctgcgaggatcctgggatgagcccatgggagctggctgagtggtagtaacttgccatcccatgtttcagactgaagtgttagatttgcatgatgcttgggtgcctgcacaccctcctgacacacagtgatgttttcccaggtggttcttcactgtcccatgtcagtagactcccggtagatccaccccgcccagttccatagacaggcttcagcctgacggcaactacagctagtgccacttgtcctcaggctgagacgcttctacgtgtaatataaaattctattatattttataagtctgtcttcaatatctctgaatacagcatttctcctcaagtttacacccattctaaatgtaaacgcagattgaatcatgattttaagtgtagcgtttgatctccaggcaacatctgtgtttaatgactagagtgtagtgtatttggaaccatcaagaagggactagtacagcagtaatacagcaaataacagctccaacccctgtctttgtccagggtagaaactggtggatgcaaagtaagtgtgtaaaaagaacacactttgcatgcagttcctttctttctctacacattatttgtgagattgcaatacaaaagaaaatacgccaggaactcagatcactgagaatgtttgtacgtattctgggataatgagtcagtacaatatctgactcattatcaaactgagaatggatttcctgtttttgataaggtaaccaagttcctcttcctagatgtgtgacctttggcaagatccttaacctttcagaacctcttttcttattctcaacttctttcctacccctaaatctgagtgtgtctgtgcacttttctcttgggcagggatagttggaagctgacaagcaatgatggaataaataatcaaatgcacataaagcaatttgcttaggacctgattcccacttagtgattcctacttatgattcttagtttctttccctgattctccccatgtttctctttgtggttgctgttgttattttgtatctcaggtgtaccatgttggattctatggttcttgtacaacactgtatcaatatttgtccaagcctgaccctctttatgcatttatttctctttttctttcttcattttctgattaccttcccttgtcccgttaaattcaaaaagcatttaatacctactatgtgtggaaatccatgatctgaagtagaagctgtaagtggttccagagccaatatgaccatcatccttattcagctcatgtgcagatgttggtaacaccaagcatccacttgtattctttggtttcagtaccagaaatagcaaagaaatatgcaaatggtttgtgtgatttatgtaattaatcccacttccctttcctatgcttgctggaaagcttagaaacaaataggtgtcctgcctctagcaagcacatgaaacttcgggaactgacctgggactggaacgtcacccccgactgggtcaacatttcctacccttctgttcctcggtcagcccactcccctccacagatatcttcacttgcttgtattgttatgggctgtttcacgttctttctgaatgaaacgtggtgtaaaggaacaaataagcttacaaatgttgcagggatgcattgtgtaaacccattttcacctgagaatgaggccaatccagtttaaactagaatcatgttatttggattttgcctgttccctgatgtcctctttggtgtctaccatctctggtctagctggggctgttgtgttgtccagttaatatatggggatgcatttgtgtgcccagtcattgagatacaggagggaggggagcccactgttccctgttgtataacgcacttgcttgtttgccccataaagccaacttgaaagctaattaggctatgtatatattggttaactcagttcccctgccatgaaattttgaaaactacctgattggaacaaaaggaaccgacaacatatcattcagtcaatgtggggaagggagaaatatgaaaaaggaggagaaaagattcgtttgggattgtcacattatcacagtggacagctcttaagcttgtcctgtgagccgacaattctttttggtgagatttaaataaggttcttggtatatgtttgaagagactgtaaacacatatgtttatagtatattcgagacctgatgactttcttttttcatttgtaatttttgtgggtacataggaggtgttcatatttctgtggtacatgatgtgttttgattcaggcatgcaatgtgaaataagcacaggatgcagaatgaggtatccatcccctcaagcattttttctttgagttacacacaatgcaattacgctctttaagtttaaatgtacgattaagttattattgactgtagtctctggtagctttcaaccaagtgaaaatgtttagttggggaaaacaggctgatcatagtaaccatcatttcatccttgtcacttcctcagtgcagctcccaattcacagagaattacaataaggaaaaatcacctcaaatatgcctttacaatgaatttcacctatcacatgtatcacaaaggcccccagctgtggcatgcagcatacatttctaggatgtagactttgctacacacatacacacacacacacacacacacacacacacacacacacagtaataagataacaaaaagcactgtccccttactacaatttttctgtcaaaggaaaaaaaaatgggaagaggaggcaaacactaaatagatatttaagtttcacacgttcaggctctatctgtttgctgcttggtagtgtttacaatgttcaaaacctgagtggaggaggaagcctttccccttggcacatacataagctcatgaattgagccagtggcaactctagggaactaagtaggtggtgactgactttggcaggtgattcttttcttggttgttgttgacatatagtaaggggcataaaccttcagtgtgcaacttgatgccattcttacctacacacatgtatacgctcctctagacagacttttagaccttttccagaaagtcccctcatgccacctccaactcagttacccacatttttcaactgaccagagggatgggttctgcagcaggctgaaggggaaggccccacagactggggttagaggaaatgaggaaacacagcagctgccggtggctctgcagtcaggagagccatggtgcaaactgcaggttccaaaaccaggtggagccccggcagtccatctgccatggcacagagatgctggaccgtcccctcaggtggacacagcatggttcgggctgatgatcaaagatgaaaaacaattggcacaggttcctaagaaattcggccagcagagaaatataggctcaaatagaacatgtgtggtatccacagagctgcaggcccagttttcaaaatgcaattacgactgaagggaggccaggcacagtggctgatacctgtaatcccagcacttcgagaggccgaggcaggagcgttgcttgaagccagaagtttgagaccagcctgggaaatagtgagactccgtctctacgaaaaaaattttaaaaattagccaggcatcaggtgtggtggcacacacctgtagtccctgctacccaagaggcaaaggtgggaggatcgctcgaggccaggagtttgaggctgctgcgagctgtgatcgcaccacttgcactcagcctcagtgacagacggagagcccttgactcaaaacaaacaagcaaacaagcgaaaacactgatgaggaagagatgatgcaattcagtaaatcagacacctagatagaaagctgctgaatcagggactgaggcttttaccccagatagggaaagaaataaacacaaacaaaaccacaaacgacacaaaactgagaagactgagttatcactcattctttgtgtcataaagctgaccattgcaggatgatgtaagtccttcagaacacacaaacatgtccacctgcagcactttggcagcacgtgacaatatcctactgatcaaaaaaatggccaaaatagtctttaaacaaatagcttggtagtaggtacttgagggatttaattgacctccaacctttaagggaggtagctcaggtgtgtgtgtctggagcaccggagccataggccagggaaaggggctggccccatcctctgggcctgtcaggttcaaattcccccagcatcagggccaagattgctgagcgaacactcccaaacacacaaacaccagtgtcttaagggataggcccattacaatttgctcattgaattaagcatgtcaaaagagactcttctgctaaaattgatttatcagaaatagaactgtttctgtgaaagtcctctctgcagtaagggtttgacaatccacaattaacattttacggatgacccacaaaaataattcagctacaggttctttcccaggagcctagaggatgtagcgactctatttctaaaagtcctacctagtggcttcacagaaactttttgattttctggctaaagagactcagagcctgtcagtgttagagaatgcctccttagcctacaggggaaaatatgatctccaaatagaatcctaatcgcattttttcctggtggttaatggtgtttcagagcttggtaggcatgccacctagtgttctccttcaagaggcctggccacattcaaagagaaatgaaggacacccacacatccgggggcactgacaatggctttgggcctgtgctgcggagtgagttggaggcacgcagctgcagcttgatctatggctctttatttatttttttaatctggcagctgccactggattcaaatgtcccagtgcaaagcactctctttaatttgttttctttattaaatgtacagacaaacttctgccgtctttgttgtattcttggtgtagttggaaggcacaaagagaacgtgctttgcttttattttttttttcgcttaattatatcaaagtccttttaaatgataggcattagtaattgttgtttttctttttttgacacacacctggtggaagcactatgttattttgatagaatatttttaaatgagaaaaataagttatagttataccagtgccttttagcaatgaaatagctttcaaattaaattttatgtgacaaataatgcaatgcactctcattatataacacttaaccaatataaaaaaggtgaggtagaaaccgctgatacaagcattgctaaccattttagtgaaaatcctttctgatatctctggcatgcattcacactcacacatagaaataagttttttcttttttcttctgaatttgtttctcttaatcatttatagccattctctcaaaggtaatttttatagttctatttttaaaaattttttatgactgcataatattctatgctctgctgcaatggctttgatttaaacatttgcctattgatttgttactgatatttctagattttggtgtgagtgcctgtgcatgtgtgtgtgtgactatatacagcaatccagtgaataggggtatacatatttatatgcatttatttatttttttgtgtgtgagtaaaatatatgtccttatacttatttccttaatttcaggctgtaataattcacacttttgctttcattttatgaaaggactccttttcccaaaaaaaaaaaaaaggaatttcattgtgttcagagtctgattagccaaaacaaaatattcttgtaacttaaattttgtttcatctgtttattgagcatttctctctgctcccatacattaggtagggttttcaaatcacagtgtaagccgtatttatggcagatagtaaccttttctctactgtgggagtcgcatgtatattgttctagtctatcagtttccactgtctgctgttttttatttatggtatcatcatatacaaatattttcatgtagtcacctgtcgattatcaaggtctccgagcctctagatgtcagatgtatctgctatttttttagtttactacatttaaaacttttaattggcctgaaatttcctttcatatgtggtgtgatgaaggggcccaaattcatttctttgaatagatggccttctgtgacattaccatttattaaataatcctttctcccaacatatcaatatatcacctggccaaaatgaagtaccatatagtcctagatttacttatgggtcctctattatttggtattatccacgagacggtgtggctctttatacttatttgagtctagtgactgcacagttctttcactagcctagcctcaaccaacttaaattaaattagcctcaaccaacttaaaacactagcctagcctcaaccaacttaaattctacataattttcttggctcttcagggatgtttattctttattagattattcatctaattccacccctctccaaatcttaataggcccctctgctgatacttttataggactttaaggcttagtcatgtgccccaagctccccctgcttagcaggtaagagttgaatatttaattgagagcgaagggtggcaaagatgtgttctaactaccatattgccagaggatcttttctacaactaattataaaagaatccataatctacctttaaaattaaaacattgagcagattttctgtcagtgaaggctacatggtggagagcactcacagcctggcttctcaaatagcctttatatggagaattcatggagatggggcagcacagatatttactgagactggatgtcagacaacagcccttagactgcaggacatttgcattgcatcatcagaggagcaccagtcacttccttaggataaacagaagcaggggtccaagtcttgctattccagcagtatgtcccgtggaccagtggccctaccaccctgacaccccacttctactttctatatcaagtggtggccttcagcactaagcagacagatcctctgcagctctgtaggtcatatgttacctgtgtgctaacctgtacatgggagaaatccaccagtacagcttctattgcatataccatcatggaagaatttttgacaatagaatatgagactaagtttctttcgtttgatttgtttttagctatgatttccaagacattgtcttataataattacaaaagggttgcatacttatatcctatagctattcaggacatcttcataaagtacctgctatgtaccggaccagtgttgtaggtggtgctgggaatataatagatataaaaggcaataaacaaaaatcaccttctcccctggctcacttttcttttctgttcccttttgtttctcaaactatgttttaaaaagttacgtgattcaagcattttaatttggtccaagtcttcctgctctatgacctctgggacagcttgcctggagggagacttggaggctaacatcctaccaaggtgtataagacaacaaggtgtacaagatgtataagacagccagagttggtttctgctgcttgcaaatgtaaccgattaatcaactttcaggctcaagtgtaattaagtttgaattaaactttctgtgaagtcccccttgtctctttagtagagcctcacagggtggggaaagacacctcggtaggctgtgtaatttccaagttatctaaaaactctcagaatttctccagctgtagcacaatatggttctatatttaagatgatccaaaatattagaccagtaattatcctttgatttaacttcaagtgcatgcagttagtatttctgaactaggagggacacaatgactttctgttgggaagattcaatttgtaaaacaccaattggattaggatgtgtttcctatgaatgggactagttgtgtgttaaatgaacaagaacaaagcacaagggaatgaatacctgactagtggtgaaaaataagaaacatgccttgaacaaggatatagaattgattagaagtctggtgtgaagccaaaatagatagtgatttggataaatgattatataaattcttgctaacaacccaagatgtgtgatacctttaaaatactgtgtttcatatcattggaagaattgtattttaacttcagagttaagatatatagaaatagaaatatgcaggttaagtgaaatcaaacgtttcaatacaaattcctttggttctgtgtgcactcagaaccaaaaagaagatatttatgggtgcatgagtttgtgtggttgaggggacggcaaggacttgggattcagctgacttttatttagcgtgtgggcaaattttatttatttcctgcgtgctgatggaagggaacaaagtgtagagcagcctcacatcagcaaatataaagatacaaattttctatatgtgtaagtatttcttagaagaaaatcattgctttggacagcccatcacctttctcaagtgtattttaaaatcgtataacttcaggaattctacctttaaactgtatacaaaatgcacttaaaaagtggatgcaatttatttgtccaatgattgctcattacattttattccttcctgccctctcttccttaacatttactctaaattacaaagattacgcatagagcaggatatatggtggctcttgaaaactgacatgtcagcacagatctataaacacgtcttatttccaagtaccaagtacagtggactccatctcatagactgatcgtgacgatgagaatagctgacacccaatgaacatttgctccagccaagcactttatacccattatcttatttattcctcacaataaccctataaagtaatattgcaattccattatagagatgaagaaactaactggtccaaagacacagctaggcagagccagaatttgaactctgggagtcatccccaggagactatgacccagttccttcctttattgattggtgtaagacaagcatgaagaagaggaaatgagggcatcaaattcacacatgacttgaaatagtaaacagtgttgtaggccagattctccctgaggccatgacaaagcaatttagtgagaaagtctgtttaatttaaaaaaaaaaaaaaaagctgcatcaaaatagatacctgaaaatgtccaggacgcactccacatgtggctgctcacaagtgtcaaaggtcaacaccaaggaaggcttcgtcagtttttatggagttgccactttaaatctcaagccactaaagaacaatgaattgtctaacactaactggtggtgaaattccttggttttccatcttgtactcggtgctataatctagagtgctggtccgtggagatgctgactgcacagcaatcaggacatgagacgggagttctgaatctgggggcaatgactgtagtaagaccagtgtacaggccactagaggtcagtttcagctggaagctggagggctgagagtgatcaaagagagccttggaagcacaacccaggaggatggccaatgtcctgttttgatcttggaaagaaaggaacagcagaatggcaggtgccaggcattgagaaatggggaggtattcacctctgccccccagtttctccttccccatccccaagccattcaattccccagggtgtcttcaggggccaggaccccttatctcacccctaggctgtttctgtgggttcagcccctcagggggttgcactctacactcccacacgccccccttcttcctctttcttctggagaggaaggccttggactctgtgcttatctgcctctgatgggttagatttcatggagataccaccgaggcacccattggctggtatgcctccatttttattttgttcctttggtttttctgattctgagtatagacagattcatttccaagaataggaacctgtcacttttgtaaagtacatgacaaacagggactaaaccaagggaccagggaattcaaattgttaattagaggagctacatttgtcccaggcattggtctctgtattaactcatttagttctcaccacaaacctatgaggtaggtaccttataatccccattttgcaggtgaagaaataaagaaagtaatcacttgactagtgttgaagggcatttaacagccatgattcaaacccagtccatctgtggtaagagtgtggggtgtgggccggcctggctctgctggatgaaggagtaaggctcaggcaacaggcagcaggcggctcacagagtgcatgcgaaacaatggaacatcactcttggctgcagatgaaacagctcagccactgggcttctaggaaaattgtctagtacaggatgtgcctcatttctcttaatatctgccccatctcccatccctgggtagcttggggtccatttctgcctactggctagccagggccccaggcagcaccccgctccgatctgtcatttagttacttagaaccaggcagcttaatggctaagaatatgttttgagagcctactgctagctcagcactcagttctatcacttactctgtgtccttaggtggttttcttttttatcctgtgcacttcaatatcctcagctataaaacagtaacaggacccacttaatgaggcaggcctcttggagttgctgtgagaattaagaatattagtgtatttaaaatgcttagaagagtagcacaaaggaagagctatgtagtggcaggctatcatcagcatcatcagtaatgatttaacaaaactcattgaacaccttatatgttccagtccccaaatacaggcaagtccgtatcctcctagggctcatatatgaggaaaataaatgcaaaataagcaagtatacacataggcaaatgcaccatgtaatgtagcaatagccaagttataaattgtgattatgaagaagataatgggctggggtagagtcatgggccaggggcagttaggctgctggggtcaggtgcagctgggacttgtaggatgagaggtctgtgtttcacatcccctgtgtcaggcgtgtgcagccctacgaaagaaactaaaagaccctgattttttactgaacaccacagacctttctcagcattgcatatattaaatccttcattgaatccttcaactcttactgtagatacgagtattttcccggtttgacagaggaggaatctgaaacggagcggtgaagaaacttgcttagggccactccatcagccaaatcatcagaaaagcagcgtttcaaccactcaggctgtccctcagctcatcactcacactcttacatcttacagaattgctagtctagtttagttttagcagtgaaatttttcccactggaataccatctcccaacttggggtggataaatcttagcctgtttcacctatttcttctatcctcctccttccagtttctccatgaccctacgtttttttctgtgtgcaccatcctcataaggacctttggaggtatttctgttgcaatgcgtagttcctgcctgtgtatttaccagcctcagaccaccaagaggcaatggtgtctattcaaccgcagtatcccagtggttctgacatcctcaactcttgcaggaaacatacttagtatatcatgaaaatctccagtatctaggacagaatcactcatagtgtatgttcaataatttattagtttgttaatagaatgaatggatagttattttcatatgtaattcttactgtgattgtttttatttacctttcttattaaatttattgaatatgaactttgtggtaaatttaacttaaatgagacacaagcaatcactttggtttcttaccttttaaaccaccctgtgcagcccattcgtgtaccatttgtggtccttccttccttctttcggtcctgaactaaaggcatgtgataagcacagaagaactgtcactaacgttgtttccagcattaatcgtgaccagcatctaaaaatgcttcagaatgaccacggaagtagaggcccagctaatttctcagaggttccaatagtctgtcttcacaaattccttcatctaatatttcaaggatgtgtgacctgttatacttttaatgctttccaagaatgcagtagaatttattaggggaaaataatatcttttctaaattgttaatgttatactctgccttcctttactgtattttgtttggtttttgtttttgtatttttttggacagagagggataatgttcaaattaaagtaaaaagtagcatgtctattacaaaggaaaataaacggaagaaaaatgctgctcaagtgaacttcctgctttttaattagtgcctgtgggaagaagcttttccggagcaatcccatttgtacacgggatcttaaaacgttgatgtgtgaattgctctcacattttccacaatcttctttcccagagcagatataaataaataactaatgaaagagttaggcaacagaccctcatccctcagaagggtatggagacagagagtaagaaaggtaaaagtggaaacaaaatatctggtagattcatgggaacagctgttataggaaacccagggagccactctcctgtacagcagatgaaagctcacacgaaaatgtatagtggtgaatttcactttgtaatgaggtaggcagtcatgcgataaaatcattttcctactcgaggatattctgttggatcgtcgctttcttcccccatcacgtttaactgctctctagtatcagaatgtcatccccacctattttattgctattttcccccatatcctcctagatacaaggagatgttgtaacaatggagaagctcctgaaaccttttacctgatgtaaaatagaagatcaaaaggattcattaatagaaatcttacaggactttaatattttttgggagcaaatgcagctgtaacgcagttttaacaactgagtcactaaaagtggcacatgccttaaggctaatgtattagtagatgaacagttttggcctacagaggagatacacaattaaaaatattcatccaactcctacacctgcatatcgtgtgtattttcatcagggcatgctaatcagctaaaacttgtctatgaggtagtgaaatagaatatttgcacatttatggtttgtctaagtatttcagaagtcttatttttttacataacatgtgataaatttttaagaaaattaatatgtgcccttgtaaagtggtagtaacttgaattgtttgacaaacgcaaacttactggtgatttatttatgatttataactgtagaatcttgaaacaaaatgagaaccttgaaatcaattggtctaattctttcattaaatatctgaagaaactgaaggaaagaaatgctaaatgatttacctgaagtccctcagctaataaaacacgttagaactgggctttggttcttgatttctgactttgaagccagtgttctttctagtccaaaaccaaaatccaaacaagggaatgtgacaaatagcttttctgcctcaatcctgttatcacagagcatcatcttcctgatgacctctcatcttacgggaaggagagcctgaagtcttcagcacagctcagtttggacacttgagtgtttggaatcctcttacatatctcactagtgcagcaggatataaaatttaggaatctggccggccagcaaagaaccttccaagaaaacagaaatacgtatcagaacaatgggtaacaataagcttttaaattttgttcatttttatatagcatgtctgtgggtgtacatatactcttttgcatataattttcaattccctcctatatggaatggttcatgcatttttaattttccctgcgtcatagattctggtcacaaacctctgttccttctgctacttttcagtgtacaatgattgtacgtaagatttatatcatctgtaataacataaatagcgataatggagtatctcgggagatgctgaggttagtagctagtctcctggatctctgaaatctcactattgttgacacatttttgccatttttctgtcactcattttgtcccccaaatgctgctttgattttttttttttttttttttttttttgtaaaacagattagaatgatggatgaaagcctgggtttgccttacaaatgtcataattccccttggattttaaaaccatagacaagttccatgcataatgcaaagaatattaaaagtaagatttcaagtagccagtatgaactttaatttagttctcttaattactagttaggggccacaagactgaaaaaaaaaatttggaaaggaaagaagcaatgcactgtcttggattttgataggagtacccaactttaagtgtacctaatcattctttaagcctgtacctatgataaagcattatcacttgcttctagaaaaacttagtggtttatgcagctactcagagatagggagagaaagaaattcgtcttacaaggatacgcaacttttttatatcagttccatcaaaaatattttattctttgattggtactataatttgacttatacttcttataatggcccttgaattttactccaagaagagcagattgcccctaacctttgagcaattttgtcttcaaagtctttcttttattttttaatacatctcaataaatgtcatgtgaattagtgaaaaaatgacgtttttatttaatgagcctaaaatgaaaaactgttattaatattcttgctttaaaaatattctatatctcatgcaaatattcacggcaagaccattgaaaattaaatgaggtaatgaacagaatcaagaaagaacacagttggtgtttgcctcattaagaccctttacaaacctcaaagtctaggtagatctcattcctttagtgctagtccatgactttttttccccaaatttgcacaaacactggtcaaatttttcccatccctgaggaacaatggctcccatacatttttcattactttgtgaagtacgtcatcttatttgtcctaaatttacttgttttgaaaaaaaaaaaaaaatccctgttatttcagaattgacaaataatccaaagctcgctttagccaagttactgactgtttcgtggaaattaattacttttctctataatagtcagatccctcattttccttctgttacaattccttggatagacttccttagtgtttgccaggcaataataaaaacaatagcacacttcaatagcatttaccatgatccagctgctctttcaacattttgcttaagagatcaaggaaacccaggcaggagggattaacaagcacacgtcagggccgagactccaatccaggcattccagctttaccatccatttatgtaacaactgacaatagttttgtgatgccaacatacaagctgtcagatctcttacctctatcgcaacagatatttcagagccttcattttatatattcaattatttaaaattctcaaaattgtacaccttgcatttgacaatgcgaaaatggaattctacattttaaatttcctagaacatcactgtagatccactcatcagcttggctcctcatttctgacacagttggacatatgcatgctattccctatattatcatctttgttgggttcctgtaaaagcagaaccaaagactctgttttaggtgcaggtggttcatttgggagtaatcttgggaagtacattgaggagttgggaaagtcagatggaaaataaagcaaagctgacaaagagtgggtagttgagtttatagtgcaggggacaattagggcacagtctcattgggcatctgaggagctatggagaatgtctcatagaattgtgcttccagagaatgggaagctagagcatctgtctactaatctcttcatgctgttgggtaaggattgctttttgatagagctctgcaattaactttttactctatttcctttgttggctaaatatctatctatccttctccatccacttaccaattcgtctcatttttgaagaattttaaaatgagttttaaagtgagttggagacatgagtatacttcacctcgaaatacttcaacatgaacaccatgacaaacaagttcaatacatgttcatagttcagtttttcagatagattttatatccggtggaatgttatgagttgtggcaaagatatagtggtacagcctcagcccctgtcaggctgcagagcattatcaccccccagagaatgatgtcatgctccttcctggtcagttccaagccctccacccagcaggggcagaaacacttctgattttttttccaccacaatttctgccttctaaagggtcatataaagagtcatgtggtctctactctggtgtaaggcttcttccattcagcaaaatatgttggcgatttttccatgctgttgtgtggagcaaccgttcatgccttttatggctgagaagtatttttgtctactgtagagggacacctgggccgtctccaggttttgactctcttgaatagagcatttatacaacaaggtaaacatttgttgtgtaaaccacttttaaacagatgcttttatttctcttttttttttttttttttttttttgagatagagtctcgctctgttgcccaggctggagtgcagtggcatgaccctggctcactgcaacccttgccacctgggttcaagcagttctcctgtttcagcctcctgagtagctgagactacaggtgcccaccaccacacccggctaatttttgtattttagtagagaaggggtttcaccatgttggccaggctggtcttgaacccctgacctaaggggatccgcctgcctcggcctcccaaagtgctgagattacaggcatgagccaccacactcggcctcacttctcttgagtaaatgtcctgcagtggaattgctgggctgacagatagttgtgcattaacatttataacaacattgatagcaaaaggtcaaacctctgactcttcatgagcattacggtggctccgccgcctcggatgctgtcaggctttcattctggtgcctgtgcactggcattccattcagactcactgacaatgttatgtgctttcttacgtgctggttagtgattcatatttttcttttcgtgatgtctcttcttgtattttgttcactttcaaattaggttcattaggaaatgtatatattgttctggaagctttgatctatttattacatatcagtactttatcaggtgtatgttttggaactattttcttatagtctggagtttggtaattcattttcttcatattttttatgaacagatgttttaatttctaagtttattactttttaatgatattgtggtctctaacctgtcaaagaaacctttgcctaatcccaactcatgaaatattctcctatttttttttccagaagctccatagttttggcattcacatttaggtttaggatccaacatatgtaaattttatgatagtgtgaggtatggatatctatatggatatgcagttgttacttttttatttggatgactatgatacatttgttgaaaatcaaatgaccatgtcatgtatgtgtaggtctatttctgagccctaaattccaaataagcctgtttctatataaagacagagtaaagataccattagtagcaatacccacttaggtttagacatggtacatttggcagattttctaggttttttgacataaagatttggaatttccagagtaattgtacattcctggaaaatgtttagtttctaatatatgtaaaaattagtattaccattttttctggagaaataggcctctagtgtcctagtaaacttggtagaaaattttagatttagagatgattaagcttggtgagatcattttaatttaaaaaataaaagaaaattttagatggcacataggcttctgatattgttctgtaactcactagcctttctgctatacttcattataataaatatttcaatataaatacaattactggattccaaatggtagcagttcttagaagtttcttttgttatataggaaaattccacagtaacatatagattagggcattcccatttgtaacagtcacactctacacacaaaaagtccacagattaggccaggcatggtggctcacacctgtaatcttagcactttgggaggccaaggtgggaggtttgcctgaggtcggcagttcgagaccaacctgggcaacatggtgaaacacaccgtcactactaaaatacaaaaaaattagccgggcatggtagcgcagacctgtagtcccagctactcaggaggctgaggcaggagatggagatgggggttgcagagccgagatagtgccactgccctccagaggacagagcaagaccgtctccaaacaaaagcaaacaaataaacaaatacacaggttgaccactcaaaacctttttttgctaaatactaattagcgagttccttttcggccattgttaaataacattacatttctacttcatttgacttaacatttcaacagctggtattccacacttgagcaaatgcctcctctgtctctagaggggcaggcttcctcaacctcacaaaacctattcatctttaaatgtcctttcacataaatcatctccgccctcattttcatcttagtttcacatgtgtgtattcttaaatgttagtgagtcaccgagcagggctattcttctagagcagtggggttggtttaattagaggataaggcctgtagctgcagagcaggtgaacgtggagcctaattcctggttgtgggtgcaggaggagacgtgcgctgggcaccatgagagatgtggggatcattgcagcatggatataaatgtgcaaggcgctccctccctttcactcatgttcccctctgacagccctgttggacggaactttgctttatagaggcatcacactgctttatgggactgctcagggcagtgcaatgtgttgtgatccttttctagatcattgttctgcttaaaactattttttagaagaatgatttctggctgttctcatacagtcactggaattgttgtgcttctttttcatcactcatcgctggaaagcattacctgtttttcccctgtttctgttctcctcgggctacaagccagagcacacattataatcttttttcttctttttacctccaatatttatgaattttaaatgttatttcagctaaaagaaagcagcatgctatacagattagaagcttctattaatactacaggctttgtaactggttacacattgcatttgattaatgaaaaatagtgaggaccagcattctttatagataaatgtgtttggcataattccatagatgccgtttaataagtgagatgtcctgtgattcctgtccttaacacagacgtaaaattgataacctattctatacagaaactagcgtggcatatacaggaagttagagacactggcatcactgtcttagaagtctaggcattcatagcactttaagaaattgttaagaaggtattcagcttgcaaaatgatagattataaatgaatagtaatatcccaggggaactgtagtcctatgagaaatttttctttttatttatttatttttttgagacagaatctcgctctgtcgcccaggctggagtacagtggcacgatctcggctcactgcaacctctgcctcccgggttcaagtgattcttctgcctcagcctcccgagtagctgggactacaggtgcccaccatcacgccccactgatttttgtatttttagtagagatggggtttcaccatattggccaggctggtctcgaactccttaccttgtgatccgcctgcctcggcctcccaaagtgctgggattacaggcatgagccaccgcacccggccagaaatttttctttaatgcaaattggtaagatttagggaaaattttttgcattcttgcttgttttgtgtatttttactatttgcatatgagttagaaaagtcttatgaaggtattatattgtaaattatgtttatcatttaattagtgaatttttccatacagttttctcttgttaatcaaagtttcttggttacagtagttccctcttgtcaatgggagataggttccaagatccccagtggatgcctgaaactttgggcagtaccaaacccaatacaaacagtcgtgcctcagtgtctgtcgggtggctggttccaggactcctcaccgataccaaaatctgctgatgctcaagttcctgatgtaaattggtacagtatttttacataacctacgcatatccttccgtatattttacatcatctctggattacctaatacaatttaaatgctatgtaaggtcaggtgcggtgaaattagccaggtatggtggcatgtgcctgtaatcccagctagtcaggaggctgaggcagggagaattgcttgaacctgggaggtggaggttgctgtgagctaacattgcaccactgcactccagcttgggcgacagagtgagactctgtctcaaaatgaataaataaataaaatgcaaatagtttttatactgtgttggttcttcaacttgtagttttcaattgttttattacttttttatcattttgtttcttttggttgaatctgtggatacagagcacaaactgtactgttttttcctatacatgcatacctatgacaaagcttaatttatgaattaggcacggtaagagattaacaacaataatcataaaatagaataattataacaatatgttggataataaaagttatgttaatgtggtctctctagcaaagtatcttattttaccatacctgcacttcttgttatgttgcgttgataaaatgcctacctgattggattgagcaaggtgaacggcccaggcattgtgacgtagtgttaggtcagaaggaggattatctgcgtcaggtgattctggatcatccagccgtgagcatgttcaagtttcaatgtcaggagcagacaatgtcaatgaacaatggcaggctgcagaaacagggtggatacgccggacaaagatgattcccatcataggcaggacagagcaaggtggcgtgagatttcatcatgctactcagagtgctgcacacttccaaacttatgtattgcttatttctgtaaatttttcattttatattttcagtccgcaatttactgcaggtaactgaaactgtggaaagtaaaaccgcagataagggagggctgctatacctctgagaagatgagattctgcctgtattaagtgagcatcctttagtgacatacatggccttcctagggggtactgggctggacaccacatctcctgctccagtgtcctctttgtaccttccagaggattgtctgtgacctagatttctggggatcgcatccctagaatgctcacgtggtcagcccatggctggcctttgtggataaacctgtgagctttgctatagatgtgcctgatcctagctagattttctcatccagtgttcttagaacccaagaaagaccctaagggttggagtagtgtatctactctcaaattagaatgcagggggtggtggtggtccagagccatccttgcctatagacaggaaggattatgacagtgatttctgcataaggtgcctcttcctttgactagtgctttttattatctctgcctgatagaaagtcccctctttttctttttttttttttttttttttttttttgagacggagtctctctgtgttgcccaggctggagtacagtggcgcgatctaggctcactgcaagctccacctcccgggttcacgccattctcctgcctcagcctcccgagtagctgggactacaggagaaagtcccctcttaaagcacagttccttgagtcccaggacagccatctgatttaggcagggtttttgtttgtttgtttgtttttaggctaatgtggtctttttttctctctcacacatgcagacgtttccttttctgaaaattattttactaacttgaaaaatggagatcattgctagcatgattatttttatagctttactgaggtatagtttgacacagtgctataagtgtatatgcttttatatattttgatatctgtaaatacctgtgaaactatcactgctatcataatgaacatgtccagaaccaggaaagtctccgactgccattcagccatcccttcctttcactcctctagtcccatcatttgtaggcaaacacagcttggttttatgtcactataatttgctttgctagaattttaataagcattttctgaatgactaatactattgaccatcagtgattgttgttatttgccatccatatattttatttgttaaaatttagtctgcttgaatcttttgcctgttttttattgggtagcttaatttcttattattgagttttgaaaagtatttatagagtctagatgcaagttcttcatcagatttataattttcaaatatgttctcttagtctgtgcatgcttgtctttgcattccctaaacatgtctttcaaagagcagaagttttaaattttgataaagtccaatttatacaatgtttcttttgtggatcattcttttggtgttacattcaagaaatatttgcctagttcaaggtcacaaaaatcttcttggtttccttctagaccttcatatttaggactatgaaaaatgttacaaggtacaagccatagatcagatcaatttaattgatccagagccacttgttgaaaatattgtccattctccactgaattacacttacattttgccaaaaattagcagattagtatttgtctgtttctgcactgtttgtcctgttccattgatctcttcctctgtcctgatgctaataccacactttcttgatgactgtaacttataataaaactcaaagaaaagtagcagaagttctccaactttgttttctttttcaaagttatattggctagtttaggtcctttttattcccttatgaaatttagaactttcttgtcaatttctacaaagaaatctgccttttgagatgttcatttaaattacattaaaactatagatctgtttggggagatctgaacaatattgaattttcagatacttgtaaaagacatgcttaccattttatttaggactttctgaaaatttctctcagcagtgctttctagttttcagtctataggtcttgtccctaagtagatcagattttgattgtattgcaaatgttatttttaaaattaaattgccaagtgtgtgttgctaatatatagaaaagcttactaaaaaagaaaaatatggccaggtctataagaaacattaagttctgttgcatcctagaaaagcaatgctcacgtatgagtatctgtgtgattctcatagataattagtcaatagaaaacagtatttacgataagaagatcggcagaatttaatagatagagataggcaaggcaaaggcctaaaggtaagcaaatcacctggtgtttttgacacagagcctggtccagaggggctctaagggtgagtgtgggaggacaataggaggtacaaacacaagtaaatgggctctgactaggcttagggttagcgttatgtggatggccctgaatgccaaggtggagatgggatttaatatggtagttagtggaaggctaatgagcattcatgaacaggggagtaatgtgaacactatagagctttaacatgggcgcactagctacaggggtggaatatggactagagactgctcatacgagactcgtttgaagcctataatagtcccaagtaacatggaccacaaaccgtgttggatgaaggcgggaggaggaaagaaaggaataggaagaaggcagaagaggaacaagcagctggacgcggtggcttacacctgtaatcccagccctttggaaggccaaggcgggcggatcatttcaggccaggagttcaagaccagactggccaacatggtgaaaccccgtctctactaaaaataaaaaattagccaggcgtgctggtgcacaagtgtagtcccagctactctggaggatgaggcaggagaattgcttaaacccgggaggcggagattgcagtgagccaagtttgtgccgctgctctccagcctgggcgacagagtgggattccatctcaaaaacaaaccaaaagaaaaaaaaaaaaaaaaacgcaaacaaacaaacaaaaagctttggtcttttacactctacaagataagtagcctttgtcaaagaagaaagaaagatctgggcagcatgttttcaatattcaggagcactgttctgggagacagaggctcagcgtgtaacatttcctgaggagaaagaagagaacaaccgttgagacagaaaactgaatttattatttagaactatatgatagatcacatccatcacccaaacagaaaaccttcctaatggtattcctttttaaaattttcattatttaacagccttgtattatatttcctatcagttacatagaaaatatgccaaaaacttatcgcaccctgacaattatactctatttcatgagttaccttctgataggtggctgaaaacagcagactcccagcaaaaaaataatctcaaagaaacatagaaggctttaatatgaattcagatattaaattaagaagtttcaacaaagttgcaacaaaatgttgagaccagaggactgaaagtattattattatggaagacaagctgttgataaaatacagagaacattaaaacctgagatccacagtatgcatgcctaacaagagtaaggaattcaacttggctgtagttggagggaatgagaagtctttctgaatgtgtcttgggttggttttgcattatagtcccagaaatatctagtaaaactgcggtagagcattttgaaattaatatagtccgccatctgcattttatcattagcagattataaattatcctgaaagagtataattgaggccatttaagatgtcttttgaatttcccctgtattaattgcatttcctttagagtgccttttatgtgcagaagcattttctaagctctggtcttgcagtaccagttgcatttttgtcagtacttttagagaccatctttcagctggagcagctttttggcaaatttatatttctagaaaatgtaaattgtgcttgctacaaatgaggcatgaacagaacacttagtaaccttgatgaggaagtgagccattctcggtgggggtaatcaggagagttagagagcaagaggagaagggcatgaaggcactacatgtgaaaatgaaacaaagccaggagctagcatggaagggcaaagtgccatcctgtcttttctgtgcaggaagggttcttggagctggagcacagggtacaggggtgtggtggggaagaggcagaggagaagagaatagactaaaaagagtaggaaggtaatccgagattaggaaaaacaaaatactggcaaaatgtggcttgccagtagtttttttttaattaaccagattaaaatgtatcaagaggattaaaaatattcctgttaactcagttctttattccacttcttccatgaagaaataactagaaatggaaagattgatgtatacaggtattcataaaatgtgatttgcaatggggaaatgcttgagatgacctgagtgcctaacgtcaaggggatgcttagacaaatcaggctcccagatagggccacatggtctggagtctttacaaaccccaaatgggtgatgtccatctctgttccacctgtgtgcaaagggggagaacattgtctgctaatcaagggtgatggttaatattgagtgtcgacttaactggattgaaggatgcaaagtattgttcctgggtgtgtctgtgagggggttgccaaaagagattaacttttaagtcagtggactaggagaggtagactcaccctcaatctgggtgggcacaatctaatcagctgccaatgtggccataataaagcagcagcagaaaatgaaagagcaggctggctgagtcttccggcctccatctttctcccgtgctggatgcttcctgcccttgaacatcagactccaagttcttcaacttttggactcttacatctgtgatttgccaggggctcttgggccttcagctacagactgaaggctgcactgtcagcttccctacttttgaggttttaggagtcagactgacttccttgctcctcagcttgcagatggcctattgtgggatttcaccttgtgatcgtgtgagtcagttctcctgataagctccccttcatatatacatcaatcctattagttctgtcccttcagggaaccctgactaacacatcaagtaatgttacttttggacgattggatacaattccattattcagtggcctattcagtggcctttgactgtcattggtatccaatattgctgtgttagttgttttgattatgatggcatagcaaaaatatatatacagtacatagggatgtaaatattaaaatattttagtctaaccaaggaaacatgagatgtgggtgaaggcatatatttatgactcattttcctcatttccactattccttccctgaattttgtctgtttggaagaaatcaaatggttttaaagaagcaagttgccctgggctcctccatccttttgcattctttagacattgtaccttattctatgcatcttattgaaaatggttttataatcacttatcacgttttggttttagttccttctttagccaaatttgtgtttcccttgactcttttttttttttttcttaactgaaagtttctgagcactgagccagtgtcaagatttacagaatgtggcttttatgatggacttcaaaagtggctccttagaattggatgaaggcaagtttttctgggcattgagattaatagtcaacattttaattctttgagaccattctgttctgttcttttccgcttgatggactttactatgaatgttctgagatcacttttataaaactatgatattatgcttgctgtctctgacgctgaaattcagtgttagttctgtctgtatctatgatattctgcttgctgtctctgatgttgaaattcagtagtagttctgtctgtattcctggtagtctcatagtgctgcttaaaaagaaaattcaactacaatcccaaattctctgatgagagtagatagggattttgatgtaataaacttgtattagacgaatcaggattaatttgcccttgacttacttgattatttaaattagttttcacttgattagctttttgtaattaaaatagcaatatggcaaaatatcagatatgtgctgactaagaactgtgtagatgcagaagaaagtattaagagaatggtaagccactgccagggattaaccaaatgctgcattttgttcatctcctaatgggaagtaatttttcaatggaaacagctgagtaagtcattttgttgtttttttttttaggttttattttttttccatctttgatttaccatagagtctagaagtcatgttgtgggtgttttgctgaaaagtacataaattatcttcagagtcctttttgtgctttttttgaatttttttgtttttttttttgcatcacctgaaatccagagttgaattaatgtccttcattttggtaacctgatttttcaattaagctatttccttttatactggtgagagagaatatctatcaaagaaagaaaatatatgtgtatcaagttttcattcatataaaaaataaaaatcatggcttcctattaagaaagagtacatgagttcataaagaaaatattatgaattgttttgattatttttactacctgatgctcttttactttctgatgcttaaataacaaattatctaccttgtatttcatataacaattattttagactgtctaaatttaatggtagtgactagtaccaaggcaaatgcagttcagcagaactaacagatgctgaggataataaccagacctgggcaagtgccatttaaacacacttcatctcatttcttttccttttttttttttttctccttttgtactagtgtcactagagtgtaggccattcagtattttcttgatctactaacattttttattgtaacacatctacttcacaaatggtcccctgagaaacctatattagatttggggactgaattgaaatgaattttccattccttataacatgaaaccaaattttcaggcattttcttattatttttttctcccagatgttctcagtgtttttcttgcttactgagcactcccctgtaatctagaatgggctttgctgtgcagggcggtcatatgtcagaggggaaatcagacaggaaatgcagaggcgatgcgggtgtcttcagcagcactggctttgaccactgtttttcagagtgtggtgggagagaggctagttcctcgacctgccctaggtttcatggccatatagttagaatgagctttatgctgatggagacaggaggcagagaaactcttggcagacaaggcaggtccctggcaaagccccacctttaagccaaaaagcctgaacccatggcccaaagtgagagcttctacccctgcttacccgctctctcccgagtacttctttctgaataatgtctttttaccaattgaatgctgccctttccaaactacttatggctcgcctcacccccatcctgtgcctataaagaccccaggctcagctggtagagaggggaaatggctggacattggggagaggtgaattggcttctgagccactgctgaatgtcatagagaggcaacctggcctcggaggagaaaggaagagagacaacctgacttcgggggacagtgaccttcccctcccatcccctttccagctccccctctgctgagggcctctttcatcactcaataaaattgtccgcattaatcatccttccatttgtctaggtaaccttattcttccagtgtaccagacaagaattcaggacccaacaagtgcgggtaccccaaaaggctgttataatgcccctttgccctcactggcagagggaagccactgcactccatgaggcaaagggcccgctgaactgataacacactgttgtctgctgacagcagacctaagagagcattgtaacatgccctctgaggcctttgggtcacagtcagccccacctggatgctgccacagggcctacacatgatttgctcctgctggggctaaagcagctgaccatttcttgcactcacttccctacacgttccttcccgcaaggggtgcgccacagcaggcccaagtgagtaattggagtttgttcctgctggtgccgaaggagcaggcttgttcctgcactcacttgcacgctccctcctgtgaggggtttagcatggtgggctgagtaaacgggacagctctgtcacaggtcctgtgaaggggtcaagaaaatatcctgcatcaatactattttctagccttgaacacttgtgatcatattaacgttttaaaagccctggtaattcaggcatttaaaatatctgtttaatttggtttaatctactatttttgaacatcatcgactttggagcccttttctgcaggtcacattggtggaactgcttttttgtggaacacattttgagacaaattaaagcagtgcattttaaacctctctgaccttgtcccagagtaagaaatagatttcacatcatgatccagcacacacatatatgtagctgaaacaaagatttcagcaaacaatttactctttctatgagatacaatctgatatttcctagttgagtctatatcatttttaaaatgctgctttctattcatttgtagaccacactctccttgacaatattgggaaattggtcttgtgtgtcctcaccgtcaccttgttattcttctggggctgataccactcatattcctggcagataccaagtcttccttcctcccaagaggatcacttgttatcatgaaatttatattgtgttcctgcagtatgcatgtggaagaactgtaaactactgttcctgatgccttggtcatttcaatcattttcacttaatttcaatgaccttgattgaggagatagggcttacctatagagaaatgatagcgggccagttagatggaagttatgatgtggctgagtgggcctggtgagcttgaggtaggctattcaggaagggtgtcatggagaacagtagttccactggttctagaagcttgaggtgactttggatgaaaattaggaaggatttggaaaatttgggagacacacattgtgaaatactaggaaacgatgtgagccaatcacaataagaccttacttaatcaatgaaaagctcccccagggttgcttgcatttggcaggataacgttttatttcattggcatgcatcagtttgggaaggtaaaatcagagaagagcctttctttccaattctactgttgagcagccacaagttatgtcttagtaaaaagtgacctttgttattagaagctcatgtgggacccttaatataaaatctgttgtttgtaatggattgctgctaatttaagggtacataaagcattataattatttgattttttttgctaaataatgtttttcacaagcactttctatgtttgtgttttagtaaaataatcagtgtaaattaattatcctgtaactctgggcagtttatgtctcttacacttttcaccttatagaaaagatttcttaccctatgtgaataaaaaaattgattattaccttatgtcctccgaagatatttttatctttataactttttcacataccctgtctctctttctttttcttaaagtgggactggcaagacgtgaatcagccagtgttcattggttatggtccatggtagatttttttctggaagactgtgtgtttggaaaaggaaaattttcttgtaattctgaaaatagtctcaggcatcaaaatatcacattataaatcgtcactaactcagttttcttgtggctgctcagtttcctcatgagagatttctataggctagataagaagaggaaaagatgactattcaactaaacattttagcttcaaccacaagctattttaagaaagggactgggaggtgaagaattgcgaagctgcaaatatgtagaaagagactggcatatgtttaaatcatatgtttctaaagtttgactgagcatgaaatttcattttctaagaaggtgcccttgggaatggtggagggaaatgctggtgcacctgtttgtctgatggagccaaaccttgagacaaactctcggccagccagcttgcccatccatgcagtgggaacaccctctgacccacttacgagtgtggagagcacattctgtttcttgaaaattcaagacagaggaaatttcaggtcatctgctgaatcatcttcagttcttacattcttcagtattgtggacggcctctgattttcttcccttttttctcttcttaatttaggatcgtccctgctgtctttattgcctcatatagatcttcactagtggctttcctatgctttgccaatttctcttttacttttattagaaactcaattgtattatatagcccacagtctcaggtgacatttgagcattttttcatagtattcaacgaccatgaattgaggttcaataattgcttgactcacctcataggatgtggggtggtgggggagaataaataacactggacagtttccttaaaatagataaatacatccaatttcctgtctgtgtcaatatcagagaaccagagttccttaaacatttcttcctttccaggtacccaaacaccaagaatatttcaccttgaaaaaagctggcagggaaagctgtagttcgttttgctcttcctttacatcttttgaatgatttagaggttaatgagcctttgtaaaggcaggacccaaatataattgagctggatttatttttccccggtgtgagatctgttgcaaaatccatactgtgctgcgttttctggagtgcgtctttttcaaagtaacagctttgatgttcttttcacctgagacgaatcctgccaggggctctgtgctctagagcagccctgcggtaacaaagccttgtgtgcgggagcagaggaagattctgccctcaagaaatcatttgtaccctcatgctctggagacagcatataaatcaggagcagaaacagagaaggcccccaaactcagacactttaaattcacatcagaaacattttgccactgtcttcttaggatacatatgtccattacagattagcccacacttaagttattgctgtgaccgatccttttcactgttgttgtccgtcaggtatttttaaaatatccatctgtttctgtatttactcacatatttattttcttaaaaagacacggcgatggtagtggatgtgtttggtattgggaatattactacgaaatgaggtcattaaattcctattggcttttttactgaattcaggaatctgcatgtgaagaagtgagatctgtccaggtgctctaggttggggatttagaggcctgtgacaaaatgcaggaatgtagagtctttataccatacagtgctttccaagacaaaacattcattcatgggggtttatttatcaggaaacttggatcctgctgcacctctagaatcctggccccctgttcttgcttcatcagtatcatttcctgaagaccctctttccgtctcttgactgccttcgcccttccacgttagtgacactgacggctgcagtccctcaccatggcactagacagttgcgcattcctagcccaaggatcgggttatttctgcatttctggcccctgatagtgaaactaccagaccctggagactttggagtcttagagtgtctgcactcactttttggcctcaagaccttcattttgctcttaacagtacaggatggcaaccttcctggtttccatcttgacttgattttactttgaaaaatgtacagtcttggctgggcatggtggttcgtgcctataatccctgcactttgggaggctggaagaggcggatcatttgaggtcaggaatttgagaccagcctggcgaacacagtgcaatctgtctctactaaaaatgcaaaacttaactgggtgtggtagtgcacacctgtagtcccagctactagggagggcgaggcatgagaatcacttgaaccagggaggcagagattgcaatgagcagagattgtgccactgcactccagcctgggtgacagagtgagaccctgtcttaaaaaaattatgaagaaaaaagaaagtaaagtcttatattttattttataaataaaataaatcaatattttaaggcctagctagccttcctggctattgcctcttctctaatacgaccttgaaggtgcaaagtaacaatgaattgtcctactgggagatggtgacagccgcagaaatggtcagacgcagacacagggttgtagtaatatttcacttctcactaccctatttgtgccaagaaatccatatcttaagtatgaatgaatgagaagaatctgtttgtcccgtaagtacccccaccctggccacacatatgagcaaccatacttgtaaacacacttgaacctgcaattgtctaaaaaagaatgtcaatttttgtcttgtcagaaagtataaaaggaggctttattataacttttctttccctttcaatttctacccatccttgaactttttgtcttgtatctgagaacttcctaatttcctgactgctggcccatctcagaattctactgcccaaagctctttggctctttgcagggaagactaaaaatatatttcatattatggttttctttcaggcctttgcttagatgttattcctttattttaggcttttttccacattttaaatatgtggtcactgtttgtttgtttgtttgtttgtttcaatctggcttatatcaccttggactttactatttttttgtttttgtgctacctgcataggaccttttaaggattgaatgaggtagtatatgtgaattaggctacaagttatgctgctgtgacagggacctcaaaatctccatgacttaatcttgatagtttagttttctcactggtgacagaatggtccccatgttctaaagtctttttttttcaagctcttaggcgtggaaacccaaacgctggtgaattcagaagtcatcagcctttgcagagctgaatcacgagggtcaaactcatcagataactctgtttaaaaggtggaatactggttggttaaagtagaataagaaccaaaactaacaaagggagaagatactaatgtttactcatcagcacattctctacttatagataaatttttttggatagctcaattgttatccaatggttgttttataggcacagaatctacaaggctagtcaactggattatgttaagcagtgatgttaccagaactatggtgccctgatgtagctgactgagacaggtcattatagggtcctccatgctggttgtcgacttggggctgaggacatctctgggtaattttttcgcatagaaatattgcgtaatttttgtctccttggaattctcttttatgctgttcatgactgtctacattacttctttattgataagttatttctgtggacaagtagaatataattaccttgattgaatgttttgtggttaaaattataaccctgtaatgcctctgtgagtgtcaatttatcatagctgtatacgagatgttcacaaatgatctctttggttattgctaatatcgtttttaagagtatgactttaaaattgtgtttggaagtacccttcccttacctttatatactaactgcaccttaaaatgaaaagtccattcagtcttaaaaagtttactttctattttataaagaaaaaatataaatctgtaaggtatcatgaaatcatatttagtagggtgtccagaatgctgagaagaactcactaggctggatctgctttaagatgatattcacattgtcacattcattgctaatccctttcctgtgtcagatgtcatgagaatgtcctgtgtttgttcccttgaggttgcaacatcaatacaaaatcaactaaagaaagagattggaagtagccaacatagacgtggtatgatcctgtatcttttttttttttttttttttttttctgagacagagtcttcctctgtcacccagggttgaatacagtggcacaatcttggctcactgcagcctccacctcccaggttcaaatgattctcccaccttagcctccctagtagttgggactacaggcatatgccaccacgccagtgggtaatttttgtgtttttagtagagatgaggtttcaccatattggccagccttgtcttgaactcctggcctcaagtgatcctcccacctcagcctcccaaagtgctgggattacaggcctgagctaccggacccagccctgcatctttttagacaaaataaaaaaaggccgggcacggtagctcaggcctgtaatcccagcactttgggaggccgaggccggtggatcacctgaggtcaggagtttgaaaccagcctgaccaatactgtgaaaccctgtctctactaaaaatacagaaattagccagaagtggtggcccatgcctgtaatctcagctactcgggaggctgagtcaagagaatcacttgagcccaggaggaataaaaagaatgtaggccaggtgtggtggcacacctgtaaccccagcactttgggaggccaaggtgggcggatcacctgaggtcaggagttcgagaccaacctggccaacatggtgaaacctcgtatctactaaaaacacaaaaattagccaggcatgatggtgcatgcctgtagtcccagctacttgggaggctgagatgggagaatcacttgaacctgggaggtggaacttgcagtgagctgagatggtgcaactgcattcctgcttgcgtgactgagcaagacggtctcagaaaaaaaaaatttatatatatataatgtgtatatatacatacgtatatatatatgtttagtatatctatctatctatcgatatatatatatatttactaaacatttatttttagttttcttacatgatttccaaagggaaggtaggttttgttaacataaaatttacagcacacttgaacaaacctggatattacccccaaaaatgcaaaagattataaactgagttcagaggtagagaggctttggagttggataactaaattgttcaatgacatcgtcatgggccagactgtccatctctagtctactatctttagcatatgtttgctggatggctacgtgggtgctatatagaaaaagagataatcagttgggagaatagggtctggaggcagggatcctaaggccgtttcacactgacttcctagaactaaattgaaacaaaaaccccaacattccacacctgagtaacaaaaggaccataggctactccctttgcaaaccccaaccttttctgtgtggcagatgggaaattgaaagtacgtttgcatagtagtgtcactttgtatcttcacttcagcctctgattggtgctgtctgcaaccagtcagactgattacaggccaagtcttcatttgcatagaagtgcaactttgtaactttagcctctgattggttgcttttcgccgcccatcagatgtttgtttaggagtatgacctttgtaacttcacttcagcctgattggttgctttctgcagccaagctgacctggatgctgattgcgggccaacactgtatttacatgagatgtccaccaagtggccaatgggaaacctctgggggtatttggacccaaaaagattctgttatctggggcccttgagctgctgcttcacccactcccacactgtggagtgtacttttgctttcaataaatctctgctttctttgcttcatttgttccttgctttgctgtgcatttgtctaattctttgttcaaaataccaagaacctggacaacttgcaggcaagactctccactagcaacaataattccccccaatgtgtaaatattcccaggcacagtgggcctgacattatgcttagcacaaaataatgagatggtccttacttacaggaaaagaacaatttccccagaccacccaaatcaccatttggggaaatccctgtgttttattctacatatccttattctgaatgtattgtctttatctgtttgaacactggtacgaactgttgacatccaggtctttattaaacagctaaaccctgagagcaacaaaattcaaagctgagaaaagtggggattgcttgtatgtctacacacctaaaagggaaattgaaggttatttttacccatcatcatcagaagagttcaatttccgtaataaattgcgttgaagtgaataccttgactacaggaagtcatcagggatttttcctctttggaaatttaatctgtgatctctcttataattagtgattaaaaagaaatgaccaatgggagttctgtgtgaaagcctgaatccttgattaagttctgggaactaaaaatgatgagttggtgctatgctcctcatcccttaatgtactaggccttttacgttcatcctcgtcgtttcactccaccgtagccttaaatgttactagataaggagcaaatgtggttctctcaccaaggcctgtcagtgtgagactttccactgtgccgaagctttacagtcagggttagcaacccaagcaagctgtttgctttttgctcatgccaagctaaaaattggtgcaattctcagcagtcaattagaactaccaaaagttcctgaaatcaactatgtaagctgtcattatgccccctctgcagtggtgaagctacaaccaaaggttgacctgggggtgggcctgtgaccataggtcctacagttcgtgtgcacctactgcagacattgtagggaagccagctcccaggaaggctcggagcaccataaacctacaccagctgatcttctgacagcatccttccacctcgatctcatctgtaagttatggtgaataatctctgcctccattctttcttacaagggtattataagaattcattaatgctgaaagtactttgagcacctctacaaagtgcttttttgttatcgtatcacatttgatatctcaccaatcttttgaaagatgtgagtcatgaatattaaaatccatcttgcatattttatgtgtttttatcatgatgggagaatattaatttattggagatttgtgcttttctaaaggttgcctttaaagttctctccaagtgcgctttgttaacctcaaccaagtgtgcgcggtaacagggtcaagctggggtagtgagcacctacattttgagagagagcctgtgatagcaagccgcatcaccagcccctttctttgccttcttaagtgtcaaccacttttaagcatattacatggagaagaatatgtagatttctttaaatgagccagataatttttataatgtcttattcaatcaaatatgccatccgttctgtatgaaattatatatttttgaccctaatgactaataacagtttgattcagaaatatctaattactcatatctctctgtgactttttccccatgagttctctgtgcctggaatggctgcagcccgtcgcttcactcctgtcttcttgaatcaaatgccttctcatttttcaagactcaattcaagcttcatcacctctaagaaacccatgcagacagaataaacacttttctcctgggcaatctcattataccctgtgctatttattacctaatatgtgcaatgctttattgcatttaattatttgcattcttattttcttcaaatgtatcttgtttgcccttgatgttcagttcatatggctgctcatatcagcatgaattgtattcacctgctaggaacaaagtccaaaaattccagtgattttaaagctgacagaagtgtacatttttctctgtagtagaagtctggtcataggtagtctaaagccgccatgtatcaccactgagaaccaggatctctgcctcattgcccttatagtgcatggctattttcccaaggtcacctcttggtccaagacattctatggcacatcagccatcaagtccatagtgcaagcaagaagaagaaaggagaattgctgataaagactcgtaccagccagcttcattctttgcatttaaggaataattttaaccttctgccaacatttcattagccagaaattagtcaatgatacttctagctgcaagggagacttggaaatctagtgttgtgggtggccattttaccaccttaaatatctcattactcaacaaggaagaaggagaaaaatatgtatcaccaagacaactagctagtggcctctgccaaggtgttcagtaattctcacatgtataaataaataaagaacatctcctagaacaattggccatgtattacgtgccaacactgcaaatcatcttgaccaattcagtcacaaaattgggaattaactgagaaaaagtccaaaggctaattaattaggttgattgccttggtttataagtaattttttattcaattctagtagctttcctcagactagtagtatttatcattattatttacctgtttccaatttcccatctttgtagtagagatgatgataaaatctacctcaaacatggttgttagcggataaaatgaattaataatgtaaagtgctcagcatggtaggtgtttattaaatcttagctgtttcttcactaaagcaatactgattctgttactgtttactgtttgtttactctattttggtcactgtgggcaatgctgtacaaatattaactcaaataatttgattataagtgccttttgaggtctgtgttgttatctttattgcataaataaaaaatccagggggtcaggatggtcattcggctaggagacacatagcgcttactatgttcccaccacagttctaagacctttatgatcattaactgctttagtctccataacaagcctataatggaggaacgatgctcatctccattattcaaatgaggaaactgaggcagagagagtttaacttacttgaccaaagccatacatcaagtacctggcagagacaggatgtggagccaggaagtctgactgccggatgcaggctcttcaccactgggctgccatctgtgctgcatgagccagggctagcatctggaattctctggtgcaggtaaccccatgacctggggttgtacatttagccagtataataccccttctcactatgcattttcattttttttctatccatttcttaattggctactctccttctctcctgccttactgcttttcagacttattgcagtttcgtatctgagttttgtgaactaaaatcttttaagcagcttatgcatggatattaatataagtgatcatgtgtttacatactcttggcatttaatatgagtcaaaatagtaaacgggacagcttacaatggtgcattgcagactatatttatggaaaggttttggtgatcatcttgcctgagtgcgctattttcagaacagataacacacaaataatcctggttagactgactctcctttaatgcttcttctctagggaaaaaggctacttccatcaaatgggacaatgggcagctatttctttatacctgctcttcgtgtgtgttaactccatgtacataagcttcttttgctccccctacttcccaacagtatataccacttatgcaaagtatactatatagcagtattctacatttatttgaaatcaactggatgctttttaagtttctctattaccaatattgactgccatgggtaatttgcatgtattgcctccaaatcaagcatgttttctttcatttttatgttgtcttaaaatacataatcaataaagcaaaatatgttgaaatttaaatggttaatttgaatgttaattgaacagtaagacaagtgactgcacttatttgagctagaatgtctctgaatacattaaactgtagattgcacagttgaagtattccaaatatatttaacttggtttatcaaaacccattgaaaaataaagcattaggtaaatttgatttgattttgaaggcttagttatatactttcaaagttttgaatcttagatacttttgataatttttattaaaaacccagaaaacttacttttgagagaattttggggaagttgcatgaaagtcaaagtttacaaaaacgtgagtatgctagcatgtttcattctgaatagtcactatatcataaataatcttttttatttttatttttatttatttatttatttattttggtgacagggtctcactctgtcgcccaggctggagtgcagtggcgcgatctcggctcactgcaagctccgcctcccgggttcacgccattctcctgcctcagcctccgaagtagctgggactataagcgcccgccacaacgcctggctactttttgtgtgttttttagtagagacggggtttcaccgtgttagccaggatggtctcgatctcctgatgttgtgatctgcccgcctcggcctcccaaagagctgggattacaggcgtgagccactgcacccggccatcataaataatcttacagtcttcctgtgctaccacttttaaaaattaatataatgtaggctcttgtttcaaaaaacatggcctttataatagtaaatattcctgacccaatccacctgcattaaattgctttcatttgtggaactggtgagggcgctccttttgaactggtttgaggtcatttggcaaccctctgagatgtggcaattgtctttcctccagtggcattgctttgctgtaaaagggaacaaggaaaccaacgaaaataacaccattcccctttggaagaaagccggaaaagcagagagctggtgccgtctaaaccacacacacatatacacacacacattctctccctcacaaacacacatttgttgtttatttttcagttgtcacgattgcttttcttcattgtactgcactgcatacctctgcagccaaacacaatttatattgccaagatagatgctataaaatgaagttgaacatggcaggcattgaaagagtcgtgtgtttgcaaatgattacctgccatatgtttctcaatttcttttttttctaaattatcatgaaaagcaaaaggctagaagggcaattgtggctcttagtcttagaaattataattttaaacaggaaactaaaagggaagttggattttagagtgcgaaaactgaatcataatgcaatccccaattgaatgttcagaatcatattatcaaggacaatgcttttattctaatagctaattctgctgaactgttttcacagaactatttagtgacttaaaatcattcaaatacccaactttatctcacatgcagagtgcctttttaataaatgaagtcattggtgacattaagtttccaaaaatataatggactttcctatatttggacatttgtactaagtagcatttattcagtatcctggcaggttcataatttttttttttttttgagatggagtctcgctctgtcaggttcataatgtttaaaacaactcaaagtaggcttgcaggcaggcaccttctgttcgttggagtgggccatttcagatcaactggtacctacagatacttcattttattcctatgtataggtgcgggtctgtttttatactttttactcatgtcctctgaggctgatgtacgtttctgctttatgaaacctaatctctcagtgtgagtccacagctaagctgagaacaagctgtcattcccagtgctagttttaggcaaactgaccaccatggcccatacatggagatgactgtgatgctgtggagagtgctatgggtgtgtttccatcatactgccatgctgattctctttaccctgcagtgggcccttcccacacccgacgtcctcataagcctctgttcaaattgtctcttccctgtgcctgtattcgtctttctgtgtcacgtcacttgttagtggatttttccattctttgtatatttccacagttgtccgctcttcaagggaaggctttatatttttgtagatacttattctaaaaattttcacccaattttaatctacaaggacttaagatggtgataggttaattaaggcgtgttagtgtagatgccaaggaaacaccattgttgatgccaaaggcattaagagcctcctttggtttctgccaccatcccctaaaatagtgacagcaaaatgtacaatatatgcatgaatacaactccatttttcagtattgtgtcaaattgagtttcattactttaaacttctttttaaggaggtaatggcccatctctgggtatcaaggaaggactgaaggcatcgatcatgtcttccatcattcttagcccccactcttgctttctcttagttaccttccaacttctaaaaattctcaagctttgctttatctccccttgttatttccttgcttggatgggcagcaccaatttctcctgtgttggaccacttggtattgcttcataggtcactgatactctggccctattttcttggtgagatgagttatgaatgggttctcttgctatttcttcacattcactgcctttttcccttctgcattatctaatcaattgttaatctctctagtgtatctttattgaaaatatggtatttttttctctccatatattacatttgagactttcaacactcacttttctcctcatcatgatcctctttccctctacttccttggacatatggagcatgtttgtaatagtagctaaatattcttgactatgaatttcattatctctgtcatttctggatcttttttaattgattgatttttctcctggttgtggttcctatttttatgtttctttgcacgattcatagtgatttactagattccagacattgtacattaggtggtggattttgtagcattctgtttaaaaaaagtttgtctttatgcaggcaacagttgagctagtcgacatcaattccttttgagacttgcttttatgctttgctggggcatccagaagagccataatgctatgggtaatttagccccaccatgatgacagtagtcttctggcaactctaccagatgcctcaagtaccataaggtctctccactctgtctggtgggaatgcaaaatatcccacctccgtgtgagctttgagaattgttaaccccatgcatgtacggaaaaataatattcagccagagattcaaggtagtctatccgcaaatttccagaactctctctgtgcaagtcacttcttttaggtattgtgtcctgaaaattctagtttccttaacctccctaaacttcgatttgtggttccccagttcaccgagacttctaggctttgtttggtgtctcccttcctctgctatagctaacaaggccaaatctttgtaggtttccttcacgtcgggatcacagtcccgcattacctcagtccaatcatatgtattttatatatataacttctatatatccactatggtttgaatgtttgtcccttccaaaactcatgttgaaatttaattgccattgtaacagtgtgaagagatgggacctttaagaggcgataagccatcggggctctgccctcatgagtggattcatgtcctagagtaagtttgttatctcaggagtggacccattatgaaagggcaagttcagccccctttgctctctcttgccattctgccatgtgatgcatttcactatgtcatgacacaacacaaagaccttgccagatgccagcaccttgatactggacctcccagtccccagagctgtgagccaatacatttctgttcctaatttacccagtgtcaggagttctgttatagcagcacaaaacagactgagacagtcagaaaacagttgtttctctatttttctagctgcttatagtgtgagagaaattagcaaagcagataacccttaaagtgaagaactaggtgtctcaggtagttttaggtacctcacctgcttcctgtaatctctacagacatttgcttaaatatatactaatattgcctccattttataaataaggacactgaccccaagaaagtttgagtagctggtaaatagcaagtcatgatttcagtccagacttgtttgatttctaagcctgtgcaacacaataatattcttttatattcccagccagacctccaaattaattggaaataaaatcatttattttaaaaagtaacccacttgaagctgaaggcttttaataaatgattctttgatagtcatgttactatatttttcttagaatagattgagtgtttcttttagagtctcattaaaaatgaggtacttataagataaatcctttttctatacattttcacacattcctctttatacatctgcccacttcataaataaaattatatttaattatttttaaatatttttatacttacaaagtaaatattttaataaatgtggataaataaataaaattcctttattttggagttatctgtgttgttacatgaagtggcctcctctacatttccctttcaggcaactgacaataaacaataagcagaggccctagctttgttacttggaattgatccgctgaagtaatgagtacataaatgactcagacttttccactcaagtttcctgtagttaaagtgaaaatcagcaattcagctgatcacagtgatgatgctgaaaacaaaggctaccatttaatgaacacttgccaaatatcatcccatgtcattttctcaacaatccaaggaggcatagaccccattttaagaaatgaggcaacttatgcctaggaaattaaattaacttactccaaattacatacctggtaaattctagattccaaatttaaacccataactgatggcttggaagccaacacatatcgcttagcagtgtattatttgcacctagtaaataaatgaggtgacatttacacaaggcagaattcagaacctaaggcttacttgggctgattcaaaaagaattaaaatacttgcatatgtattactgagtagctaagttatattcaaacagctgaaatgcatcaaatcgttgagttctccttaagtgaatcctactaaaggggaagaagtttttcctggatgttccttttcctgttcctgtgtgagatatgcatgtatatatgaacacacaatatatataaaattatacctatacaatttctatattatagaaattctgtagattatctacaatttataaaaatatatttatttatatatatttatatatacataaatacattatgttttaacagaaatttagaaagtagaacatgtttctttcctaaaatatatgtacaatgtattctgggggactcagggctgagggtgaactccagttgagggactcagcaaggcttcagtgagaaaatccatctgacttgggcttttgaataaagactgtattttgagcgcttttgtagaatgtaaatatattacttagttcatcctaatatgacttttattttgttctttaaataaagtggtttgcaatcccaaggagtcccttacttttgtgatcagaaatgatcagtaatgtcagaaaaggagactgaaaatggcccctcccctcccccattccttcagcctttcacctttcacctttcaccttctaccttctctgaccagcccattgcaaagaccctctcatctgcagatccacagtcagctacacacactgtcactgacgtggagacaagagtcagggcaaggagacagatggcctcagcactccagcagactttgtgaagtgatgatttcaactctgatttaaaattttgagcctcagtgtattatcaaaaagcactttttctctttctgttgcctcagtcagtctgtaggtataaataaatgtcagcttaataggtgaatgaagtatgcaccttccaacccactgaagagctaggatctaatttactgttgttctaatttctcagattccatattcaatgacttcttttaaaatttcagttaggacaactaatcgggaataaaagtaaaaatgttttctgtgcctttaatcgcggtgttttagctagtcctggtggctcaaacctgtaatctcagcactttgggaggctgagacaggaagatctcttgagcctaggggttagagactacagtgagctatgatcaggccactgcactccagcctgggagacaggggaagacccagtctgtaaaagccaaacaacaacaacaaaactaatattttattattccctaaaaatagtatattttgtgaattagacagaatttctttatgtaaaaggtgatgctactgatatgccatcagtaaggtgggatgctctgtgttattcccagttgtagtgataggttttgttataacatgtatatttcttattaaaagtactaggaacaattggcttgtcatagtttcagtatgaacagtttcgattaaaccttgggattttttctcgtgtaaaaatagctctattgtaataatggactctaatctttagttttcaacagtgctagcatagggtcattattgtaattacttaccagaagaatgagctgacatccactctttctttttggcactctctgcctccatcaaaacctttttccaatcaattctccatgctgctgtcaacctttcttttcacctatggctttgatctcagagtagctttcactctaaagagaagcaggtccaaatcctcactctttgcttcaaagcctttaactagatcatccaaaatttttcaactttcttctgccttcatttattcctactcagacattctagttaaataaattccatgtccttgaagtgtctgggcccattcacttcactctcccttctgaaacttctcctggccacctccctagctctgaaatgttctgcacatgtatctggcgaatatttgatgttctcttccatcagtaacttataaaacaagcaaacaaccaaataaacaaacaaaacaaaggaaagcaaggtttttcaactaataagagatttggagatttttcctttaacccaaagtctggtgctatcttgcttcccagatgtgagttaaaaaatgattttattgacattgtaaatgtactctggtggtgacattgtatatgtactcaagcttccactgtagtgttcagttgagctggaattccttctcagctccaccagttcccatgctgtcttggaccatgtgtctcccttgcaaatccattttctcatccctaaaatagtgataacacctaccatatagagttttgtaaatatttaataagaggacgtatactgggtaattcattcgtatcagacagaatcttgttgtagcatctcccaagttacattatttcgtaaataaccttccatatttcttcacacttaccatctactacccaaattctctctttctttttctactaaaaatgcctcaaaaaatatctaggctcagcatctctccatgctcacctcccactctagcctgtcatttcctcctaccactcttcaaaacgactccaagaatcctcacatccccaaatgacatggtcattttctttcatgacttctgggacatcagagtccgccgaatgcacaccggccacatgggccacttctctttggctgccctgacgactcttcctcatcttcccagcaacccaagaactgagcacccatatctcattttaaaactcttctctattattataccttttaaattattgtcattcgtgcccatggctttctgtgatattatacatggatgactacaaaattgatatttccagccctatttctctccctttctccatccttgtatattcagctacccattggatagtaggatggggaactagcatctcaaatattacatgtcccaaatagaactctaaatacttcctgccaaacctgcccttccctgaagagaccattaccccagagcacagcaccactgctctctcagttgctaaggacaaatatcttcaagtcctatctgactcctgtctttcttatacaggcccccatctaatccatcagcagcgttgctgacgctacctccagctagaccttgaatccgatcacttcacagatccctcacttctattctcttgttcaaacaccatcatccctcatggtgcctccaggcagcagcctcctgcccagtcctattcctatcagtcttcaatgtctagaatgttctcagctgattctcacacagcagccagagtgatccttctaacatttttcagacacaaaccatctgcctgcccatcacattcacagtaaaaccctaagtccactgtgcccatgggactgtcctgatgtgattgtggccatctctccaagcacatgttctgctgccccgacaatggccacggtgctgtggccaaatgagcttctagactgttcactcagtatcgttactgagctcctgcatcaggacctttgtacattctgttctttctgcctggaaggcgttcattcctttaaatctcagctctaagccgtctcctctaagatggtttctctgcccaccctcttataacccgccatcccaccgctctgcttgatttttgtccacagcacttatcagagtagatttcagagatagagatgccctggagtcctggccctgttgccttcaactttgaactgtcctttacccctgacaccagaccctgcctccccatttccacttcaggtggtcaccacctcttattggaataattaatagatgtcatactggtctcttctgtgctagttacaacgtcgttattattccagtacatttcaacagtgatgattgcatttgaacctcacaaacaccccgttagataagatagttattatgtccatcgtgtagattgaaatattccttctcagacaagatactgcatatacccaaggtcatgctaattattaggaggagactctgaatgcagagtattctattgtgtgccttgctgcctctggtatggcctgtccgtggtcgaggtgaagctctggccatttcattcctcacatttttattcagcaggtagcatatgtcaggcactgtaaaaacaatgagggtttcttaaatagagcccagccgtcatgacccagagtatgaatctgcaatccaacaccaatctgccttttcacgactacttcccaaagtttcacatcagtcacttctcagcagaatttgttaccttcagaaatgtttgttcccactgcatatgatgttctttctcctctctgtgtccactccttcccatcttcaggggtcaactcaaacctcattcttcggtaacaaaacccagctctatgtaatgctttatcctatgagctgtcatggcatgttatctgtaagtgatcagttaaccatcaccacacgtcggcggtgttggtgtgcaagtccacactccatgcccagcccgtgatgtccttgaaggcacagaccatgactgaagcacttgccaaccccaccccatataggatcctatagattgtagactctacctttacatttgctgaagaaatggatgatgaataaacatttttaaatgttctcttttctttaagtctttattagaagattggcagtgcaaaaaatcttacatttttgtatctgaaatatatgaagtatctttggaaaaatttaaggcttgtttctaaggctcagcatatatttacacctactggctttttaaaattaaaataatcattttctcctccaggtaccaagaaagtagctcaagggattgcagaatctaaagacacagaaaaagatttatagatacattatttcattcctggatcttatttcagctgttatccaaatagcttcattaattcagtcccaaaccccttccacatctatagcagtcctaggggaaatcgagttactaatataaactaagataacaaatgttgcttttcatcattggctgatttttatagaaacctggaaatgtgtgctatgaaaacaatgtgaaaagagagaacattatacaactaaaattcatttggccattattgcattactgtgtattctggttggtattttagatgttatttgccctgtgaaaagtttctcacttgaagctgctgttcctcaggctcctgtttagagggtgtcatcatgtgatctcctaaaatttctgtgtatataatgcctagcatctgatgcattctcagtcagtcattattaagctgaatctgcaagtagttcatgaccaaggctgtcatggtggtgggaattgcctcatcattaatgaatgccatgaagctgtgattttcagggaaaggaaggattttgaaatagaaatgattgtgaatgaaatataaattttaagaaaagtattttgaactcgggcatcgtagagcaaaagggagggttgagctgttaagattatctaaatgataaacatttcagcattgttgtccttgtcattatatcatctatttggtgaggatccattttttaccagacactagatacttttcatattattctttatctaatcctgtgacaaaaatattatttatctccattttacagataagaaaatttaagtttaggaagaaataaatgtccttgtatcacacagcaagtgagtggtaaacctagaagtgagactcttcctggctgcaaaatataaattgcattcagtatgtatcatacatagcttcctgtatgatggatagtcaccatagatgtagcagtgcattgatttcctactgctactatctaggttgggatccatgtccccagagagagtgctattctaaatatttatcaactggttgttcctgggcacctcccaatgtgaatgcacactacagccaatcaaaatggaccctggccatattttactggcattcgagccattctgatgcacattgatttaacatcagacctggacctgctctgtaaaccttgaaatgcatgcaaaattacgtgtccgtgtgtgtgtgtgtgtatacagttgttacccgtgaagaggtttgattttattgggttatcactgagatttttgacctctaaaaatagaaaccttctgttgtgtgatagatgaaatgaatgggtttgactaaaacaagatatttctatttaagaagcagtatcaagacaaaaaaggatttctgaggtgagaggcatttgtgggcattcgaaaggtgtttgtggggcagtggggcagaagagaagtgaggacaggctgcagagtggtagattcctgtatttgggggccagaaagatcattcttcgtttggtagggtctgtacaataagatggagccttgtgttggagagctgttttgttctttattatttttccaaagctaattgagaagcaagcttcattctctactcctcaattctaaagcctctgagactgtaaggctcatttttttcttactttaattagtacatattatttcctattttcgtatatttttaacttctataatctagctgttttttcctcagtgtaaacactctacaggggaaaatttgtttctcagatgttgtaaaaatagttttggacttactgtatatatttactctataatttaagaagtaggccattatatatcatttcaaataatatttataaaacattataaataaccttatgcagttctgtgaatcagtcctcacatcaggaaaagtattttatagtaaagtgttaaatatttgaaaatgaaattagtatatttaactttattttataaaattagaatgctccaccctctaatgaagtggcatattcacactctgtttggtacattgaggaacgttccaagtttttcttatttagcatccttgtttgtttaccattttccttgcatgctgactaaggaatatatagctctagaaaaaaatttacagcacttattccatgcatgtttctccttgcttctggccatattagttctgcctcatctatgttagtagcagcaaaatgttaagctgataaaatgcttccacaaagatgacattttataccagttgcaaacacttatttatatttgaatctttatttaattaaagctgtattcatgttactttctctaatatttcccagaatttgtagatgccaacaaaatgttatctattgtaaataaaattaaagctcatttaagaaacctaaggtatattaatgatgatgaagtacttaatataaagctacccagtaaattctgataaaatctgatcaggaatttttgctcttgagaatttttgtagcctgtggtttcacattcattaggatcataaaaccctttgatcagtccctatatgatgttatcctttagatgattctcaaaatgttggttgagtgtacattttaaagcattcatttaccatttaagtgaattagggcttgttagtcacctcagactgctaataaaagaatgtcacaaattgggtggcttagaaacagcagcaattctttctcaaagttctggaggctggaacttcaagatcaaggtgtccagcagattaggtgtcttctgaggagtttctcatagatgggcaccttctttatgcaacctcttatggtggaagaggcgaggcagctctctggggcctcttttataagggccctaatcccatccatgagggctctgcccttgtgacctaatcacttcccaaaggcccccacccttaatgctatcacattggggattaggtttccatatataaattttgggaggtatacatacattcagaaaataacagggcccaagacaacttttcttatcaggatacttgtagtataaatgcactactgaaaagataatgtggacttgctttctctcctatagtaaggtgtgagattgtacagtcggctggtgctatggcttacagatgctgtctacgtttggcctctttcccatctctctcactttttgccacatactatgatctagatgttgttcttctaccataaaaatccaatgctttgatgcattatctgtagtcaaatatatatagtgtatcttcaggctgtatgaccccttaaaaacacaaatatatgcaaaacaggtaaaggaacccctttagtgatttactatgatgactttttaccatccacttcacactttcatttactaatttgacatctacatattttctgttatgtgataggcattgagtaaggtactggcaatgctgttgtgaacagaagagacatggctcttgccctcaggaggcccacactctagcactgaagacattcagtagttactgcagtaaagctgagggaaggaaagcagaaagttctggaggaaataagcataagggagcccagtggagttttttggcaataagaagtctcactgaggatgtgacctctcagttgagtaaacattcttaacaagagaagtagggctgaagtagaagagttgtatcatgcagaagaaatagtgtgaagaggtgaggagtacagagctctcatactgccatagctggagtcccgcaagtgaagggatgaatacctactggattttcattgtatattttaattgtgtatttataagtatgccagtaaagatacctctcaaggattatgggattcataaggctccatagggatggaacaatcaaaggattcttttaatttgcctttttatgtagtgaagtattttaaaattacaatgtgttattcaaagtaatgggcagtttttataatttctaggaaaagttttgaaggcagattttccctatgactcaacgatgcacattttattacaatgtttcttttctcatttgattcctcagttttttcaccgcaactctttctatggctatacttggccattgattcctgggatgtgaaattatggtataaggtactcacttatttcactacttctagagaaacatagcaaagaagagaaataatgttattttagtatgcctactgatttttgaacctttgggtctttaagtttcctttggtttgcatttttaactcatctttctcactctttagctcctttttgctagacagcaatgaaaagcattatatttggaaagcaaaagttgagttggtagactagcaccttttgagtaacaggcttttcatgttgtgtctgggagaaaagtcatttggcattgagtgcattaggcaggtagtcacagcggcagcgtgccttgcctttgcaacttggtacgaacattgtataattgattttgttacaaagttcaccaagattatctgacagttatttcaatatatttcttgaaatccttctggctttgaataagtatccattttattggtttagaaatcaataatgtaaaaaggaaaagaactgggagcttgtaattgaatgtgacactacattggtgcagataatatctgttctggatttcagttattaaacatgttatgtcacagtatgtactggaagcaatctacatttaactgaataaatgcaaagtgcagttcagtgagagaacatgggaaagtgtaaaatgtaacatgaggaaaatattaaacaagggaatgctcatacttcctagggaaaagcaaacaaacaaacaaacaaacaaacaggaaaatgaattagagtaaaagaggagactgttggttgaacagacactggggcatagaagagagatatttcttgatagatccagagaaattctaattttaactcaaggtggaccaagagtagctgcaaaagctcaggagaaataaacatttggtagctggtctgcaggaggattaaatgtggtttggagcctagaggagaggaggggctcctcacaatgagaaaccttgctaaaaatggacatttatttaatttgtcaatgagaaaacttgtgaaaatgtgtgactttgctattccaaaatgaaccatggcaacaatgaccacataatttgaccttttcctaaataacgataaactaagtgaagaagggttgttaaatcaatcgaaaccaattaagccagttttaggcagccacggttaaaggataagtaacaatccttgagggctttagaaaaacaaatttcagtatattaatgcatcatctatttcatgagttcagaaatgaccaggtaccactggctaagccctgatagcacgtccacatgcagaactctgtgtttagtgctgcttcccattgggaatgagaatgagaactctgtgtctcggtctttgtttctgcagtgataagcatgcatatagcacagccattgtttcttcctttatctcccactgtgctttttcacagtgttaaaacagttaataggcacccaaaaatattattatgttgctcaaatttgcaaccatgtatcatatatggagttgatctgttagacatcataatctacagaagccctgcttctgtggctgctaatttttaggtgaagctgtttctggcaatgaaacatcatccatatctaatagatctgacgatcttcgtagcaggtaatatctctgacagttctctacccgttttaaatacagcaattcaccctccaactgtaacggagtcacaaacctagacaagacatgtcttagccatcaaacagccatttacaccttcattcaacaaatacttattgagtacctgccatgtatcatctttaaatgtgagttgtgcctctgtttgaaaattgccaccagctctaccaggttcaataattgacccttttatgactttggccatggtacgttaccagaaatagaagatgtgttgcacagtgactatttgtttgtgtataagtgacgggttgtgagtagttgggtgggtaaagacaagaaaataggtatgggatcttttccctagatttccacaggggtaatcgtgttctaaccctttcttctaatcctccctagaattcctgaaactgaaacagtgttttatgtctttcagctcaagtcttttgtagggaaaaaaatattgtccctaataaaggaagacatgatgataatatttacatgttgcaatcaaatagaacaaagttctgcgccagtgaagaactcaaaggaaaataaaagatcaaaagcagcgcctccttgagaatgtaaggggggctgtgtttctccctctgaggtgtggtgccgcccgtggactcacatgcagttattcgtggagctccggggctggattctgaagcatgtggagacagtccctatgggctgtatttagggatgtgctacacgatgttggcagcgtttttcccgtttctatgtttgctaactgttagtgtcattcttattaaatcagaactgaggactacgtgtcacattcccacaggacagctggcaggttggaaggtggcatttgagagaattcctcactttctataataatcgtacttgatgccggcagagcttcctatgcaagcatttggcaccactgaccctgacttcctctccaggctcccactttctaagacttccctgacttctttgacacttgactgagggatttcattccttcttagtcattcttccatgactaaccctgattaattgttctggctgacttgccatgctcctcagcacccgaaacatggatggtcccgaaggttacttcttggcgtctgccttttccttctcaaaactctcctatccagctgtcttatactccctcagagtgaaatagacttatctgcagattctcctcaagtctttatttttaatcccgtggcattttcttggatgttagacagttctcacttgcttgtgaaaatgttcatctttatgctccccagacacctcaaattcaatgtctcccagccacacccacaacctcaacgttcatactccattcacccagccacagagcctgcggttatctttgattttctcccttttcaattgcatttcaaatcagattccagctcaatgggcttttcttgcttaatgtctgctgttattcatccctggcttaggctctttacaactttgtacttaatgtagtgtagtgaactcccaacctcactgattaaaaccctgctctgtccctttcccagcgagggaaagacagatcccactggttttttgcagaggaaattttaagtagagaattcattacacagagttagaaaactgaaaagcaaaaatgaaatattaagggaattgagacatgctaacagtaagaagctcccaccagccctggtgttggtgaaaggaagtggaagagagtaggtttgtcagaatctgaaagctcacagatgggacttttctcggagctgggtttggatcatcaaaatggcatgatgaggctagttctccttgcttaaaactaactagaggctggaaacaacagctggtgcttggactaagtgctgcttctgggagaagcaattgttgctcgggttgtgtgctgctgccagagtgatacttacagggcaatcaactcaacaggaagaagaaaagccccttctcccttcctcttgttttccagtctccctctagtgcctcctctcggtatagtctaacaagaaactagctgttaagagttttgagtaatttaatgtcaaaacattagagaatagaatacaaatggagggttttgatgttagaaacaatagttaagtaattcatattgaccaaccctttgggtccacactgaccatatcttttcagaacatatactgctttgcacatactcaaacttccttttcataacagtaaatactccatgggtatacctaataaaaaataactattcgttcaaacactctcttggcctctcctgagcaatggaagacacaatttccaaccatcatactatccttgtctaaaagatgttaatttctcttgtagtttcttcttacttgcaacagaatcttataacctaaagaataacttaaatgataaagttaaccacaaaattacaaacatataagtaactagtggcggtaaagaagaaatgaaatattagttaccatatacatacctatatttacactgtattcatataactgataagtttatatttgtttataacatctcttttctacagttcctcttctattaccttttccttcagccataatctgtttggaggttgcctttttttcccattgtataatgtgacccaaatcttcattcctgaaagctctaaatacccaacagtttaatctttattggttgccatagttttcattaacttgtacttttggacatggaaataccatgagctgccacaggaattcccctgtaaatgagatccatttctctccctcactactgtgtagtagcaattcagtttttccctagaaattgtgaccagcatcccaggcaacatagtatcccccgttttttcttgttacttcagtgtttaaggaactcaaaatgggcaagtaccagtctcaacttttttttttttttttaactatttttgtttctcctggtggaaaccttgccctcttgggtacgaagacatttaaaccagcagagcccagagctgagaagacacgaatgaaacattctgtgaatgggttattagatatagtagtgaaagcagccactcccacatcatccagttgattctgcaggtgtgttttctggcagtgagagaagcagcaccatatattggttgctgggtcagcgcatatataagaattcaaatatatatcagagatagatagatagatagatagatagatagatagatagatagaacagattgagccccaggctatccaaatgttgtcacctactgacaccaccactaaggcttttctaggtcagtcagcagtccatcagcccagctgcttctgggagacttgataatatgagaaaaatcaacagacatgatcccattgccatacttcctttgcagcaaaatgagttcattgttctgaagcatgtgtgtgagtgccatatcgtgactaggatattctataaacctgtggacaatgatttttctagaaacaaggcagacaggaatgatgaatccatacccaaaataaatgccttttccagcgaggaccgtttgctgcctcctgcataatgtaagggtccaaagtaatcaacccactcctaagaggccccttctgggagaactgtgccctgttccatgctgagcactcactgctgcaggagatgagcacacaggagtgttggtagcagatcagccttggcgagaggaggttgtatgctgcccaagcatagctctgtctttgccacaggattcatctggtaaataggagaggctgaggaaagaggctccatgacattcacagggcatgtcgtcttgttggcccgattactgacagcctcctctgcagtgaacccccttgagagagcatttctatggagtgcagatatcttcacactggagactcagttttgaggattcagtaagaacaatttgttttcagccttctaatcccattctttccaagccccttaccttccaaccagacccctaatgatcaccaaataatcactgtttcctatacttctgtctcaatcttgaccaagtaaataaccacatgctgcatcaaccagtgttttagtgacagtatattgtactgctcatctgtaaataaggcctgaggtttttcattcctatgtgatttggtcaaaattctctctcctaggagtccacaggtatgagctgagccagcagagatgcagcaggccagctctcatccccttcatcatggccaccccacatggtttctttatgttcatagaatgaggtgtttagtctgtatcaggacccagcagctaaccacaacagaacctctgtttgtcatagacattgacatataattgtatctgttggatcataaggcccttgtcataaggcaaagcagcttgcactgccatctgaatctgcagcagtcctctcttgcccaagactccaatcaaaactggtagccttacacatttcttgataaatgggtgaaagcagtacaagtgacatataagcccaaggaggcccatcaagtactgtccttcttttttagtggtaagcacattgcaatttccagaaactcaccttttaacttggagggtatatcctcacatgctcggaagcattcaacccccaagaacttcactaaaatgatggtgcctacattttcatgggctttattttccacgggttggcatacatcttattcagacatttaaggtatttgctattttctgttcatctggtctgtgtggtacatgttgtcagtatagttagtttgaggtaagcatgatcaacatttctgcaaatgtagtcaggacaaagagcaggagagttgacatcacccagagaaaagtgcaggtgctatgtggacccgaccaagcaaaagcaaatggcttttggtgatccttgaaagttgctatgaattaatttgcctgatcaaaaggtgtaaactgccagatgccaggagctgtgtttatttgttccagtgaaaatatcatatctggaagagcagctgcaattgcaatcacaagctaagtaaatttatggtaattcacaattattctctaagtccaactgctttgtgcatgggccaaacaggtgagttaaatgagtatggagtaagtagatgagacttgcctttttcaaatctttgacagagatattaatcgttgcccttcccccagcaatattaacatcctctggtaggaaggtcatattttagaagcctcctggctctggtttaatatcgctcacaccagggggcagagagacatgcaggaattctgccagttgctgcaaatgtctgttctaattacatattcaggaactagaaaaataaccaagtgatgcatttctgaaccttctgcaatctccgtaaaatagacgtgggcctcatccatttatcaccttaccaccaaaagcctccactttggtgaccaacatggagttttagttaccatgaattggttgcagttcagagctgataatcctgagcagaaatgtatgtttcccttactccagctcatggttgtcctattaggtgaaagtccttgcaatacctacctgtgatgatagaaatgatgatgacaaggactatggggttaaatggctagaagtctagtgataggaaatcataaactcgggatactttttataaaaaataaatgggccaagcacagtggctcacgcctataatcccaatgctttgggaggatgaagcaggagaattgcttgagcccaggagttccataccagccttagcaacagggtgaaaccttgtctctgcaaaaaaatataaaaattagctgggtgtgcttgtggtcccagttactcgtcgatgtgggaggatcactggagcctgagaagttgaggctgcagtgagccacagtctcgccactgagctccagtctggatgacagagcaagaccctacctgaaataacaacaagaacaacaacaacaaaacagagaacttctattttggcctgaagaactaaaaagataatgataactttctcccctcttagtcatagggctgagttgcagaaaataacatccaaaatgttacagaattacaattaagttcaagaaccttcaaacagccttgtgtgtgaaagtcagagtgattggcaagatattggaccctgagactggagtcatctaaatagattcagacaaagctgattttgaatttccaaatctctctgattctcccctcccagagaaagcagcccttctcccttccttcaaggcttcttacctaaagacccgcttgccactggctccttagaggggcaagataaactgttcttggaagtggcaaaagaagccagaggaggggaaaaaacagctgcttctgggacagcgcgccactgctggggaacttgagctcatgtgattttgctgacacaaaccgcaagcagacaggaataaggaagttcccttgcctcttctcctgcattgtgaattcctgcctcctgttgacagctcaccaaatccagctggcaaaacattttgggaaaagtagttggcacagttgtgtctatagcatccagagcagagtgtggaagagtttggaggtgagagaaaatgtctgagtacctgacagccctgcccagccttcaaggcaaaacacaggttggcagcttattcacagtcctttccctgatcatcccgaggccccttgatttaaagccctgtagactttgtgccaattgcaggattaccgagcacttcctgcagtgctttggaacaaagtctgtcatattttctcataactaataaggtatcttcacttcctttctaagaagaaaaagtgtgctttttctttgggtctaccaggatccacaagaacttgttaaaggaaatctttgaaggtatctattctgaagtagaaattcaccctcacttactactataatatctatctgattagttcacttccctgtgcttattccataaccaataggcatacctcatttcaaccagctattttgaacgtgtgtgctgttggtcacaaatgcaatgggatgatctgtggatgtggccagatgagttattatcataattagaaacgcaagtctatgtgtgctctagactggcagcatgacaaggaagacatcatcatcttcgtgttcaaaggccaggacacctccacgcccatgttgctaatttgtcaagtgttgcttataggagttccaagttattcagagaatcgtaggctttttaacttttttgtaatgcactggttaccttataaatgaaagcaaatattaaatactcttttggttgtggttggttatttggctgtaaaagagcacatgttaatgttgctgactttattaactcatcattgggcatttcaaggttaggacttcaggccttttgcttggcattgactgagcagccacagcttcatgtatacctgccatgtgtttgtaaaaatgaagcaaatacattcatgtataatattgaaaactaggggaagcatttaattttaaaaatgtagtatgctctaagctgaaatgtttacttctttttaatgtgatcatactctttttttttttgagatggagtctcgctctgtagcccaggctggagtgcagtggcgcgttctcggctcactgcaagctccacctcccggcttcacaaccattctcctgtctcagcctcccaagtagctgggacaactggcgctggccaccacgcctggctaattttttttagtggagacagggtttcaccatgttagccaggatggtcttgatctcctgacctcatgatccacccgcctcggcctcccaaagtgctggcattacaggcgtgagccactgcgcccggcccaatcatactcatttttaaaatttgaaatgttaatgaaaatgtttcactcttgtcgcccagactggagtgcaacagcgtgatcttggctcactgcaagctctgtctcccaggttcaagcaattctcctgcctcagcctcccaattagctgggattacaggtgtgtgccatcatgcctggctaattttgtatttttagtagagacaaggtttccccacgttggccaggctggtcctgaactcctgacctcaggcaatccacccatctcagcctcccaaagtgctgggattataggcatgagccaccacatcggcccaaaaatgtttacttttaaatatttgatttccatcagttgcattcactcagatgtttctctctgtgcatagaggtaaaaggcttgtcctcaaacctgactccagaaaggatggagcctggaacctgtgttgggattccatcttgaggctgttgttcgtgcagaactgcattagtgtggatgaatcaagctgcagtggagaaggaaatcaacaggttctgacaccatctcaagagctggtcagagcataggagttactgagcagcctttacagggacatggtctgtaccttccccccaattttccccacctgctgagggagacttggcttggaaatgcataggtctttctcgcagtctcatacaatttcacttttactatagttcacatggccaggatgcagggaaagggccacagcgtgggatctgtgattaagcctcccctaggcttaggcccttcggcgaaagcctacgcctagtagactgcaagcatatgtcagactgcttgggtatctcatcctgaacatgactcccacttggaatcacatacctttctctagaattgtctgatgcaaaaccatttacgtgccagcataacaagatttaaaatcattcttcattatctattttaagccccactttctctcccttcccactttaagaagctttttctttccctgctttgtgtttatgatttaaagtggtttttatgtcatcgtgaattacagctgctttcccacagtgatttacatttttatgtgttactcagaaaccatcctggacagtttgataaaacatacttcactgagctgaaactctgccttctatcctgttgtctgatgaagtttggaatggatgctgtcattcagttaaaaatccttcagtccctctgcaatataagcagactaaaacacacatccctgaatttgttattatttgatctttgcagtctggtgcaaagtattcctttccaacatttgcccatatttcagctccatcagtcaactcaaaactcccctatgttctccaccctctaaatgactttcacgcctgtgcatatctctgcaatttcacttatttcagtgtattgctgttctatatttcctattctctgcctgtctagactgtgagcaccttacatagagctatttgttttatctctgaacccatagtgacttatggtagtgacaggcacacagtacacactcaatctaaatgtgcagcgtaaacgtatacaggatctaatgtacacacgtgctctcgtcccttaagacacagtaaatgattatcagattggattctagctgattgaaaagggcgtgacaaaaagtccgtgaggccagggctcagccatcttctttctcttatacacatctttatgatgtcgtccctttcctagagagctgtttcatgccagaatcataatgcagaaattgatcagcaattgagacccaaatctgccgctaagccagtgggacactcaagtaggaattgtttgcatgttgtgatcaatggattgcttgttgacttttctgtggagtcagttaaataagtcaccttgtacaagatccttatgtggcctgcagtttattaatcaaattttacccccttgcaatggattttaaaagcttgttaaatcaagtaaattgaaatatttggtgattattcttaatgattgtatatctataccccctgctcaagggtaatgtgtcagcccatgaagtttgctgaagggtaaatttgatctgcaaataaggagggattcttattcttctgaattcctatctatatcttttaaagtatgaagagtgggcagtggccctgtaaattgtgaggcggctttttatagagacgggaagtaaaacatctctggattcccagtggaaaaaagatgctgtggagagtgtattttaaactctaaaataaatggataactcagatcaatctttttagctagtgctattgatgtatgcagtaccaaaggatatttggtcctagcaagattactctactgccagttacagctgggaagtagggagtctacttcagacatccgcttttatctatctccagaagccatcttgacccatatgggctcctgccagctgatttttttcatgggtttagatgatcctccgaacactcaaggcctctgatttggacgaagctcatgacaaacaccgcttgctttccttctctcaaagtgatctctcagataacacttgggaaatattttaaaatctcatttgactttttttttttttctttggaaacatgtcaaatttttatttatttatttattttaatgtatttatttattattattatactttaagttttagggtacatgtgcacaatgtgcaggttagttacatatgtatacatgtgccttgctggtgcgctgcacccactaactcgtcatctagcattaggtatatttcccagtgctatccctcccgcctccccccaccccacaacagtccccagagtgtgatgttccccttcctgtgtccatgtgttctcattattcaattcccacctatgagtaagaatatgcggtgtttggttttttgttcttgcgatagtttactgagaatgatgatttccagtttcatccatgtccctacaaaggacatgaactcatcattttttatggctgcatagtattccatggtgtatatgtgccacatttccttaatccagtctatcattgttggacatttgggttggttccaagtttttgctattgtgaataatgccgcaataaacatacgtgtgcatgtgtctttatagcagcatgatttatagtcctttgggtatatacccagtaatgggatgcctgggtcaaatggtatttctagttctagatccctgaggaatcgccacactgacttccacaatggttgaactagtttacaatcccaccaacagtgtaaaagtgttcctatttctccacatcctctccagcacctgttgtttcttgactttttaatgattgccgttctaactggtgtgagatggtatctcattgtggttttgatttgcatttctctgatggccagtgatggtgagcattttttcatgtgttttttggctgcataaatgtcttcttttgagaagtgtctgttcatgtccttcgcccactttttgatagggttgtttgtttttttcttgtaaatttgtttgagttcattgtagattctggatattagccctttttcagacgagtaggttgtgaaaatattcaggatacaaaatcaatgtacaaaaatcacaagcattcttatacaccaacaacagacaaacagagagccaaatcatgagtgaactcccattcacaattgcttcaaagagaataaaatacctaggaatccaacttacaagggatgtgaaggacctcttcgaggagaactacaaaccactgctcaaggaaataaaagaggatacaaacaaatggaagaacattccatgctcatgggtaggaagaatcaatatcgtgaaaatggccatactgcccaaggtaatttacagattcaatgccatccccatcaagctaccaatgactttcttcacagaattggaaaacaatactttaaagttcatatggaaccaaaaaagagcccgcatcgccaagtcaatcctgagccaaaagaacaaagctggaggcatcacgctacctgacttcaaactatactacaaggctacagtaaccaaaacagcatggtactggtaccaaaacagagatatagatcaatggaacagaacagagccctcagaaataatgccacatatctacaactatctgatctttgacaaacctgagaaaaacaagcaatggggaaaggattccctatttaataaatggtgctgggaaaactggttagccatatgtagaaagctgaaactggatcccttccttacaccttatacaaaaatcaattcaagatggattaaagacttaaacgttagacctaaaaccataaaaaccctagaagaaaacctaggcattactattcaggacataggcagggcaaggacttcatgtctaaaacaccaaaaacaatggcaacaaaagccaaaattgacaaatgggatctaattgactttttaataactactacgctgtcctggggtaactaccgatcctgggataatttagagtccaaaattttaagcaaaaggagtaagtatttgactttcagacataagtgaaagatcagtaatgaaaattgtgtacatgtatacatatacataagcataactcttgcaaatcctgtaacacatgtactacatatccctctcccttcattgaccacagtgcttatttccaacaggtggagggtaatttaactgatgtgagacacttaagaagattctcttttcatatcttgtttaatagcataagttctaataaatggcatcctggatcataatgttgactttatgggaaaggagacattaccttctaatgaaaaatctgccatgaatgaatcattcataatttgttgaataatcctttacacttggatgcattttacagtgtgcagcagaatgtaatcatgcttgatgacctttgagcattcttttagatcgggtcttttctaattgtagcctctgctcagcaaagacatgatatttcatatggcttaatacatagaaatgatcagttacatgaggcacagcttcttctcatccttttataggaggatgtcagatcatttgtccacaatttctgtaggatttgtgtaacatgaacttgaagactgttttcatgaaagcctgcttccattttcatgaaaatgaaagtattgcattggttttaaacgatgaaatcggtgaatcagttctctgagaggcagatatatgcaggacgtcatggtgtgttttcttttctttgagacaggctcttgctctgttgtgcagggtggagtgcagtggcgcgaccatggctcactgccgccttgacctccctacctcagcctcccgagtagctggcaccacaggtgtaaaccacgatactcagcttttttttttttaattttgtaaagatgggggtctcactatgtttctgaagctgatcttgaactccggggctcaagtgatcctcctgtcttagctcaagtgatcctcctgtcttagactcccaaagtgctgggattatacacatgagccactgcgcccggcctaggacattatctaaagtgtgatggaagacctaattactgtcttcaaagtgcttacaattcaggttggggagtgcatatccaaaggaagctttatatttttgtgatgacaaggacttctagaagacactgtgttgggccaaataaagcaaaaaagtaaacttcaattcttttgtgactttttgtgttactttatcttttttaatatgtggtattttaataagaatcttcaataaggtaggagaaacttaggtattctgtgtaaaaaaagtcctagtaattgtatagacatgaatacctataaaattattatcagtttcatagcaaatcctttcaaaaaactttagactgggacatcattttccacatgaagaggtctggtctttaagaatgttaccacaatatttagcataaagctggatttgtaaatggatttttaatgtcaagtgttgtttgaaggttgcaaagatattcgagttttcacatccctattcaactgttccagtgtggaaatgtgctctctgcattagtccaatatgtttgtagatacaagtattgagagtgttgaatggagataaacaatttggcttaaaaatcagaaaactggcttagattcataggtctctctgatcatgtcttggctactgatattctggatgacttcagtagcgcattttgattctctgtatctggaacacagtttctgctttcagagactttggaacgaaactttggattcaacaattggtggtagaattctgttgagttatggaagcaagactgggaggccccagggcaacaaactaaagtgtggaaaatccagctgctcagaggcttggcatactgaaaaacgatttaattcaatcatcagaaacttctggttgtttagtttctctctccaggaaaatttttctccacctttttttttttaattgtgagactgtagaaaacttgaaagactagtacagtaccgcagtgatttactctatgcaccatttctttatcttttgacccacttgccttccttctcacacacaaatacccatgctacacacaccccgcactcacacaaaacatgatacatgtgtgtatgtatgtgagtgtgcacgtccgtgtgtgcgtgtgtgttggtggatttgtttgaaagttgtagtgtgcatctctttttttttagacagagtctcactctgttgcccaggctggagcacagtggtgcagtctcggctcactgcaagctctgcctcccaggttcacaccattctcctgcctcagcctcccgagtagctgggactacagatgcatgccacaacactcgggtaattttttgtatttttagtagagacggggtttcactgtgttagccgggatggtctcgatctcctgacctcgtgatctgcccaccttggcctcccaaagtgctgggattaaaggcgtgatctactgtgtccagccagcgtgcatctcttaaatgcaaagtcatcctgttccatcaccatgcctgtacgttgactcagtgatattatttcatgggcagcccttgtgcacatcttcccatccatctccgaacgtcttctgtggacatctgtttttcttctcccggttgaggtgaagcccacacgttgcatttggcggtctggtcatgtcagccacaacttcctgccactttttgtctgtctcaactctgacatacttaaagacgtcaggccagtccttttttgggatgtctcagaatctggatttgtcctgccgttttcctcatggtatgttcaggtgaagcatgtgtggcaagaccgtttcctagagggtgtgtactttacattacatcccatcagcaacacagaacgccagctcatctggtggcgtttgtgatccccactagcatctgatctgataaagtctctcccttgtgagtttcatactcaaaaggacatcgcccctgtttcaaggttgcctttttcttatgcaattagtagacaagatgtgggatactgctttcagaccatgtcaagatgctattcttcaacggtctttttaaggattcatttctatttctgcccaaataaataattgcatttgtggtttccaaaaaaccagaaagatttataattatattgtttgtttacatttgccatttagcattcttctttaaagaacagtttgagaaaaatgaacccctttaaatcagctcctacatagttttgatatgtccacattggtctttgagtccttgctttttggcacagaagttccaggttcatcttctatttaccaaaccctaggatctggctgttacatttagacataaacgttgctaccaatgtttttgcttctagaccattttactatatggtagaatatgtgtatgtgtgtctgtgtgcattaatgagttcattcatataacttcaggaataccatagaattatctattgcctttcccctttcagtattcatatctaccttttcccatagtgagaacccacattaccgtaaacatcaatatattaatttatttcttttatcccatagtacacacacatagtacattcaaaagaattttgaaattgactaaaacttaaactgttgcaaacaacaaacttatgaacagaattcaacatagtgttaagtaaaacacaggatttatgttaatatttctagacagtgtttactaaatgattcatggtatgcaattggcatatgatgttaattgaatttgacaagtgaaacaatgactaatttaagcttggggatattgtatatgcttcagatcctgagtaatgtccaatatacacctacagcaacagtaccaggaaacagtttgactcataaacagctgagaaggcggtaaatgaaataaaaagcaatctttgtataagtgctcattggatgttggaaagtgtttaagggacagcatctgtagagaggaagagcttggccaagacagctcctgtattaatatatcagactataaatagcagaggagtgcacactgtaactcctaacttctcactaagaactggtgaaaactgcaaacacataaacaaacaccctatttctgctgagctcatggagtcaactctgtttactcatctgtagctttccttccttggtcagggtccgaagagccatagctggtccctgtatcatctctgcccctcatcgtcctggccagggctgccttgcgtcctcactcattattacttgtataaagtcctgaatttctgcacatgcagtgttttgtcattggctattactaagtcagttgtattttctagtggattttataaaggatctacttcctgaatacagcttttatctctctctgtatattcttccaactttgcgactttctttgtcttactgatgtagaaggtggaagtcaactctggaggtggggctcaggcactggaccaaattgaggactagctaaaatagggctgggctggaagcagctttccatatgacacacccaccagggtgctgtgtcagtttcccattgccatggcaacacttgggagttactgccccttttcacgacaacaacttggtgacccttttctagaaatttcttcataatccaccccatgaaattaaaagtgggtataaatatggatgcaatgctgcctctgagctgctgccctggcacactgcctacggggcagcgctgctgctgctgtacaccgccacttcagtaaacattgctttttaacaccactgacttacccctcagttccttcctgggcaaagtcaagaaccctcctcagctaagccccagttgtgggtctcacctgtcctgtgtcactgctactataattagtgagtttgttcctgtgatggtgattaaatctatctagtcctactcagcaccatcctatgaagactgacttctcaacggtgaatgcaggaaaatcctcatccttcacaaacaggtcctccgttcaccgttctttgtcactgcactcagcatctttactggctgctaggcctatgtttaactaaccctgtcacaccaacaatttaatgacctttttaatattacatatatggtagttagagaactttagaattcagtctaattatctatttgaaatactctgcgatttgagttcctgctatgtttcagcttttgttgttgttttcatggtggttggtaggaaacactgacatttcgtaaaatgtgcgatttgctaaggaaagggtttctgaaaattagttcagatgaaatatgcataattatagtaaatacacacatgatctagatgtaatatttagtgaagtgcgctgattcctagtgcatttagtgaggctgggtcacagaaagaagcagtcctcccatggggaagctcccagaggaatggattcaaagggctgtaaagggctgtgtcttctggaacaaaggcttgtctttctcttttggcttggcattggcatgtggaaccatttgcatagattcccaccactaagcataatggcaaatctttccctgtgaagcaggagtgtgggacgtttgaaaaccaggtacatgtttggagcaaactgaacgtaggtgttcccaagcaaaggcatttgacatatcctttcttgaatgaacagataaaaatgcatccatatgtaataagtaatatattaaagaagtgcatagtgtatattaaatagacataatatgtatttccttccttcttccttcattccttcctcctttcttttgcaaataaattttgggcttggaacttagattctatggggttttcatttagagaaaaagtcaaagactggtgttttttgacaaacttgggagtaagaaataggaaaagtttatggaaaagctggacagaaaccttaggatctggggtttgcctgccctggtagacacatctttgtgattttcctgataacttcatacacaactatgcctgatgcctagttcacagcaacaggaaaagagaaaaaggaacagtgttgttgaggagacaccctagtgatataacagtaacaacagccagggttaacaaaggcatgtacctctcctggtcagtgttataaagttgctgactgggccatgctttaatctccaaaatgagaaactcttctgttctctctcatttaaaagattagttatttgctttataaattagccactacttggtacaactttttattcatttatttattttgagacagagtctcgctctgtcgcccaggctggagtacagaggtgcgatctcggctcactgcaacctccacctcctgcgttcatgcgatactcctgcctcagcctcctgagtagctgggattacaggcgcctgccgccatgcccggctaatttttgtatttttagtagagacagggtttcgccatgttggccaggctggtctcgaactcctgacctcaagtgatgcgccccctttggcctcccaaagtgctgggattataggcctgaaccattgagcccggccttcaaccttttatttttaagcaaggaatcttggtactcactcaagagttgtacctgatgggggttgtgagaaactgtttaaatgataactgttcccatttttttcttctaaccctacgctcacctctgagtgagactcttggagcatggggaatacggataggttgagtgacaccgagctcctcatgtgtattgaaagagcaaatgcacaggtaacctgaagcttttgaactgagaaattttcctaccataagaattctggaaagtgaacagtgagggctgggcagcaagactaagcccctcacattgcctttttgcccttctgggctagtcagtcaagactggagtgcatacaacatcgtgacacttgtgtcctgagtaacacaggaaatgactctagttcagtccccaggacaaggtcagacatatgccaggggaaggtattggttagaggcatggagctctatttcgaatgtgaatggttttcctttccgtgaacttgttaaagttgttctgtgctgccacagtattgccttgtgcaaatcttctgatttgtgcaaagtcccagaagaaatgacgatagaatgctgctctcctcctaagtaaaatgaagaagtatctaagagaaacagatgattcaaaatgcttttaaaaatagatattaatgaagttgaaatgtttaggttatttcaactgcttggttgtattaccatttaaaatatctttaattatggatgtaatacatgctttcctgctttcttcataaaatgaaaaaaaaaaaaaaggaattcactctctcatgtcctcagttctgttccccagagttagccacttgtacgtgtttctccacttagttcttttggggattatcatcatcgcggagctattgatttatcaacattaaaatatgcacattcaccccccaccttgaaaacctaataatttggcattctttgccccacatctcttctcccagcctgttcccattgttaatctatccatcctcttcccgtacttacgggagctgtaatcatcaagtgcattgttactttgaacgacatactttaactctgatgtattcaacaaactttgatggaacttatcaaccaatcattttctatccacatttttcaccacttttttgtctcctcctaaattctgtcagatgtagtaatacagttacattgacaaggtttataagattgtattatgtggccgggcaagtatgtatgacgattggatccatgagaaagaaatgatatttgaatgtttctcagcctgtactaatcattaataatgttccaaacctcagagtttataggagatatcagttactaaaaatcttatcatattttagtttgtttcatatttggttcagatttatgcctttcttttactgctctattgttctcagagaaattgatttttatttttcttattggtggaagaaacatatgcctttatgttatagttaagaatatctgggccgggtgcagtggctcatgcctgtaatcccagcactttgggagaccaaggcaggtggatcacgtgaggtcaggagtttgagacccgcctggccaaggtggtgaaaccccatctctactaaaaatacaaaaattagccaggtggtggcacacgcctgtagtcccagctacttcggaggctgaggcaggagaattgctcgaacccaggaagtggaggttgcagtgagccgaaatcgcgccattgcactctaggctgggtaataagagtgagactccatctttaaaaaatgaatattttatttatatttgtagaatttgttgtcatataatctcctttctccttgaaggcattatttgttagttccattctttattttgatgtggtttggctgtgtttatagcatttctctcccaatttgaaggcactgctcttctaaaacttggcactactattgagaaggtgaattcaattcgggcatttgtttcatatgtaggtttcaggtgttatatttcttgtaaaacctctcagattttctatccccgtttagagccataaaatatgtcaaggtgggttctgtcttcttttcgctgcataccctttgggctgttttactctaatgcgtgatgagtgcttctcacttcactatgattttaaaaaccacagatacgtaagctatgcctccatagattatggccaaacaattggtattctttgatgccacccaaaatcagagcatgtagccagcatggagaactagtccttttatccttattgcccaggaaaatatccttatttttaaaattatattctcccctctctgatttctgccatcttctttaaggatgcctattagaattattttacttcttaattttgcatttactttaaaaatatctctttctttgtatatttttgtcgttttcctcctactcctgaaacatttcttgactttatctttttgatccccacccctaaaagtgtggaacgtggaccagcaacaattggtgttacacggtgggcttgttgagaaatgctgaatcccagagtccacgcctggcctgctgatgcaggctgcatttcattcttatttatttattaataacaaatctcctggtaatccacttgcacgtcagagtctgagaagcaccggttctttgatttcttcttctttcatgtaccttccattaaacagtcctattaatatgattagttgttgtctttgtgcatcttggcatttctttttcatgttatttacttacctccaaaatcagatgattcctgcttgtttattaatatgtgtggccaaacaatatgttaattagtattggaaggttacatagattccctattgcattttggaggcatatgcacaccagaatcttgtgctggaaatacaccagtggaatgtgtgtgttcaggcgtcaggaggcttcccttgaggaagaacagagactgttctcatgttttacctggattaactcattcaccccttccaaccaaccttgaagtaggtgctgccattagctcttcatggagatgaggagtgcagggcacaagacaaacaaactgagtcatgcagtaagtggtagagctgagattgaaacccaggcagcctggcttcccagaccatgatcttaatggccgcactgcagaaggcctctcctttgctttgagcccttcatggaggggctttgctctgtggccctcacctccacagcacaggctgccatcccctgagactccacttgccctcttggcccagcttaaatcgtataaggccgaccctctcggagcatcttatgctctttcgagaacagtgcccaggatttcacagctacatacaggtgaggaagaggaggcagctggcagaggcattttactgagcatctcctaagggacagtgctaaacactgccactctcatctgccgtctgaggctaggtcccttcattgtgaatccgggcctttctgggctcagaaggcccactgccctggcgttcctctgagtgctagtttcaatttctcatctctggagtttgttttgtttgctgatatcatcctctattttttttttttcagaagttaaaatgtagctaagagttctcccagaaatttaaatatttttgcaatgtttgatatattgcccttatcaagttagagacttctgttccattcctggtttactctgttgttcttttctgtttgctttaatagtaaagttatggactattattaagtcattgcgtccgtattataagagataataagtgctttacctttcagtttcttcctattttaaattacattgatggggatttttcagatgataaaccatcctcacattcttgagataaatcttgatgatgggatattatttggattctgtttcatatgtatacttacaagtgaaatggaatttcatcctcattttcttttattgctcctgttttatttagaaattaatttaaacaaaactgaacagctttttttctttttcttttttttaaacatgaaggaattggaatgttacttgagagtttagtggaactcacttataaaaccctctgatcctgttttttttaaaaccattttattttagctaatacacattttcattcaagttatgtatttctttttttctttttttttttttttttgagacagagtctcgctctttcgcccaggctggagtgcagtggcgcgatctctgctcactgcaagctctgcctcccgggttcacgccattctcctgcctcagcctcccaagtagctgggattacaggtgcccgccaccacgcctggctaattttttgtattttcagtagagacggggtttcaccgtgttagccaggatggtctcgatctcctgacctcgtgatccgcctgcctcggcctcccaaagtgctgggattacaggcgtgagccaccgcgcccgggcaagttatgtatttctgccctgtgtgttcttcatcagcagtgtgccatgccctctatttcttctagaaattgggctttgtagtttggtggacccacaaccacttttccaactttcatgctttaagaaggcatggatcttttagataaaatacctgcgtatgtttttcaaatatttgtgcaaaaaatagtgaaggtcgtctccagaatgcagcatgagcagtcgaagaaaatatttatgtatcagtttccccgttttcatgagcgctttacttatcttttaagattaataatgtaattgtttttatacaccatgtctagattaacctaactagatagaggaaagtattgatgattgccattaattgttattgttttcctatatgcaaatgtagccaggaccaaaagagacatggcacctaaatgcaaggcatagtcttagctggtgcataactaatgcaggaacagaaaaccagacaccgcaccttctcacttataagtgggagctgaacagtgagaacacagggacacagggaggggaacaacacacactggggcctactgggggatgggtggggggacggagagtattgggaataataacaaatgcaagctgggtttaatacctaggggatgggttgatggggcagcaaaccaccgtggcacacgtttacctatgtaacaaacctgcacgtcctgtacatggaccctggaacttaaaattaaaaaagagaaaattagaaaaatgaaaaacatggtaagaaagaacataattgagacaacttacatcaggcctgtggattaaatgctaatagtgtatcaatgtgagttcctgattttggtgaatggaccaattgtgtagaagaatgtcttgtttttaggaaatacacagtaaagttttcagggatgatggagcatcatggcagcaacttactcccaaaagtagttatgtaaataaagctggaggcatcacactacctgccttaaaatatataccacatagttagagtatctctagagatatagagagttatagtatctctagatctcagatataaatccacacatatacagtcaattggtttttttttttagagacggagtctcgctctgttgcctaggctggagtgcagtggcacgatctcggctcactgcaagctccacctcccgggtttacgccattctcctgcctcagcctcccaagtagctgggactgcaggcgcccgccaccacgcccggctaatttttgtattttttttttagtagagacagggtttctccacgttagccaggatggtctcgatctcctgacctcgtgttccgcccgactcggcctcccaaagtgctgggattacaggcgtgagccaccgcgcctggcccagtcaattggtttttgacaaagacgccaagaatacataacggggaaagtactgtctcttccataagtggtgttggaacaactggatatccacaagcagaagaaggaaatgagacccttatctgacctcatatacaaaaatcaacccaaagtggattaaagctgtaaatgtaagaactgaatctgtaaagctcacagaagaaaacacagaggaaaagctgcgtggtattgatatggccagttattttttggatatgactccaaaagcacaagcaacaaaagggaaaataggtgggaatgcatcaaactaaagaacttctgtatcagccacgcaacaatcagcagagtgaagagacaacctatgaaatggcagaaaatatttgccaaccatacatttgataagaggttaatattcaaaatagataaggaactcaaaaactcaatagttagaaaataagtaacccaatttaaaaatggggtaaagaaacagaataaacttttctcaaaagaagtcatacaaatggccaacaggtatatgaaaaaatactccacatcataaattatcagggaaaaaattatcattaaaaccacaatgagatattacctcatacctgttaggatggctgttatcaaaaagacaagagatggccgggcacggtggctcatgcctgtaatcccagcactttgggaggctgaaggggacagatcatctgaggtcaggagtttgagagcagcctggccaaaatggcaaaaccctctctgtactaaaaatacaaaagttatctaggtgtggtggtgggtgcctgtaatgccagctactcaggaggctcaggcaggagaatcgcttgaactcaggagggagaggttgcagtgagatgagattgcactccagcctgggtgacaaagcgacatctatcttaaaaaaaaaaaaaagacaagaaagacaagagataataagtgataagcgctggcaaggacgtggagaaaaggaaagccttgtacactgttggtgggaatgtaaattggtacagccattatggaaaacagctcaaaagttaaaaatagaactgtcatatgacccagtggtctcacttctgggtacgtatccaaaggaaacaaaccagcatgtcaagggatgtctgcactcccatgtcctttgccgcactattcacaatagcccaggtagggacctacctaagtgtccattgactgatgaatgaataaagaaaatgtgttatatttataaacacaataagataccataggaccttttaaaagaacaataccctgtcatctgtgacaacatggatgaacctgaaggacatgatgttacataaaatgagccaggcacagaaaaacaaatattgcacggtttcacgtatacgtggaatctaaaaacactgaaatctgagaagtagagggtaaaatgctggttgccaggggctggaagttggggctgtgtgtgggcggggaggtgttggtcacaggaagcaaactttcagtgagtcaggaggaaaaagtgatgtattgcacagtattgcacaatatggtgactgtagttaataacaatgtattacattcttgaaaatcactaatgactagatattcggtgttgtcaccacaaaaaataagtatatgaggtaatgcacatattgtctcaatttagctgttccacaacacatacatatttcaaaacaacattatatacaataaatagatatcatttttgttgatttaaaaatagttatttgtactgtgcttgcaatgctaagtttgaggttgtttcataaaagacatacatgtattatacttcaattaaacatttcaacaaagtattatcctgttgcctcttttatgccaggaattacaattaaagccgttagaagggaatttgtaaaattaaaagtgctagaagtcattggtgttacatattcataggttctgaagaactgtttctccagggaggggtacgcttctgtcaaaagctgactttcagtaaaaaacagtttaacttgtttcagtatgaaatttatgttaaaaagaaattacaagtttaacaaaactagtcatgtaggaaaaaaccctacttttaaaaatatgccttagaataatctgaaatgccctgaatggtcaaggtcaccaggtcttcacagagagctcttaatcccaagattgtacctgacggcccgtggccagaggtgattccatgggaacctcaagctgaatttaaaggaatttcaacggtgttaaagttggaaatggcatggaaaaatgtatgctggcctcaattaattttcttctttttttaaaacaagtatgtatatgtactgttatccaacaccctcttcaaagcacaaagagcttttattaaaagctatagtaccttgaaaaatgcatggcttctgtgtgtgaaaatgtcaagtgtaacggactccagattttgtatattcgtcctggtggcagagtgacaagtccacatctcattccacatccatccacccctcttcacttgctgctttagagttcctgatagggaaacaccattctctttcctgagcctgcaaggctaagtccttttcaagccaacgtactgaggaatgagtactggacaagttaacccttaattctcacaagtacatggaagaaatgtcttccaatcactccgaatctgacttttacaggataagtaggaataatgtagaaattttagattaagagtaaaatataggaaggaaggattttctaggtagggaactcagcttgagtgcagccatgacctgaaaggttgtacgtaagcacagtaaactacaaataaatgttgatgaagatattgagagatgtagctgcgagcataggcatggggtttctgggagtcctaagtagcagcttagtgtccaaatagcttagacttttcctgggctccaaaatcagttgatgcatcccaacggatgcgaaacataccatcagtgtgcaggaataaaatactaggactttcatttatattaatttttaatcaaagcaaataggaaaaacccctcactttgctcatggtatgcccactcccagttgcctgaatatttctgatggtcacaggtaacatttgggaaaagcggacattcctgtgtgccagcattgatttgtctcctgtagcacataatagtgttttgcagttgacatgatcctcgtttaaactaaagcaactcttacaaaatgaaatagtattgaagactatactaaggcacttcaccagccacattaacaagcaaaaaaagaaaagaaaaagatggttttatcagatctgacaagagttaagcactatttgaaataagaattcatatccaccactattaaccatgagccttgtcctcagggagtgttgtgcaatgtgatgctgactgctaacagtgtgaggctgagaccatggtcaacgctcttaccaagaaatcacctaaaacttgaagacaaactttggtgaagtcatcggtaattaaaaaatttcaccagcattagagtaccattggaagcttttcgttggtttcctactcaatagtgaaaaacaaataaccacgtgtcaacattgtaattctctcatttggatctgttcttaaattctaagcagtgtgtattttatggtgtacttaatctcttagtagagtaatgcatataaaatttgtgaataaacaagatgctttgggggctgtgtgctcacattttttactagtaagtatgcctagtcaatcacacgtggaaacaaccatgcaaggtggaaccactggagattttaggcagagaagtgaaatggttagcctagaggtgaaggaatgaacattacaactattcagcaggcaaaatttatttccttaaccaccattacggaaattctccaagttgcattgactcacatttgaatcctgtctccaccacttgctgtgtatgtatttgggaaaattacctcaactttctaagccttcggtcatccatttgtcaaatgagtgtgtgactctgctcttacagactttgggacagctcatgtggatgatgtatgtgatgtgcttgaacacaagacacataatatgtgttccagcataatattctcttaaattgcatttatctaaatggtacacattagctatattttgacagacagttttaacttttttcctaaaaaaaatcatactatacgtgctcttttcatgttaaataataatttttggccaggtacagtggctcacgcctgtagtcccagcactgtgggaggccaaggcgggcagatcacgaggtcaggagttcaagaccagcctgaccaacatggtgaaactctgtctctactaaaaacacaaataattagctgggcctggtggcatgtgcctgtaatcccagctactcaggaggctgagggaggctgaggcaggagaatggcttgaacccgggaggcagaggttgcactgagccaagatcctgccagtgcactccagcctgggtgacagagcaaaacgagactccatctcaaaaaaaaaaaaaaaaaaaaaaaaaaaaaaattccagctgtatgagtccattctcacactctgataaagacatacccaagactgggcaatttataaaaaaaaaagaggttaaatggactcatagttctgcatggctgggaggcctcccaatcatggcagaaggtgaaaggcaaaggcacatcttacatggcggcaggcaaaagagaatgagaaccaagcgaaaggggaaaccccttatacaaccatcagatcgtgtgagacttattcactaccaggggaacagtgtgggataaaccacccccatgattcagttatcttctgccaggtgcctcccacaacatgtgggaattatgggagctacaattcaggatgagatttgggtagaggcacagccaaaccatatcaccagctatagtacggttagtccttgaaataggagtgctttgtaagtgaaacatacaatgtgagtcaaattttcatcttctctaaaatattgattaaagggctaatggaacaggttggcttatctatttttatatgcttgtacttttaaaactacacaaaattggatgtgaatggaggattaatagctaatttatagctaattcttagagtttagggaacagagtgagaagcagcctggacattctagaaggtgtttggggtgcatcctaatctgtggtaaaacaaatcctcgggttctgatctgttattaatgctccagaagcaccaatcttacaatctacacatgtgtagatatctctgtcgttatagttggcagcatacctaccatcttgctaacttgtctgatccacatatgaaataagtgctccaaaggagtaagtacgttccctgtatggacacatttttcactctgtgcactcaatcccatcaaataaccaagacctcttctgcagatggaatgctgttaggcactgtgggtgtgtgtccaggatcttctttaactttatcctctcgatgacactctgaacttagtatcgctgtccttattttacagatgaggaaactgtggccctctgagagaaataaattgtccaagatctcaaagctatgcaggatacaaggtagcctggagacacacacctgtccacctctggagcccacgttcttgataccaaaccattcctgcaccagaattctttctggatattaagtttgcatcagtatacctcctgaaatcatgagagcctttgaaaagaaatgcaaaatgagtaaatacagatatttaggcaggtatcagaaacattgcacaggattgtgagttattctgcagatgtaaaaatataaaattcattacattattacttaaattaataggtcagcgatcgtaactgctgaaatctcagcaatttttacataaaaataaaataattaatctctccatgtaaactataaaaacatttaaataacctctcaacatatatggtgtgctgcataccaaattcaaagctaaccagttcattctagtcagctccaagccaacatttacctctaagcaccttcccctcaaagggcaataagaatgaaacccagagttccacaatctgctcatcttgttcatttttagagtcggggaggtgtaggcctcgtgaggactaacctatctctgtagtggcatatttgtgaccaggaccttatttctttcaaaatatatttgatcatctctaactccagaaaagtcaaaattcctgtatggatagaattcacttgtagtaattctaaagccaccttgtcgaaaagccttcccctgaagacccagtagaaagatggcttcaccccagccatcttcagccttctttgtttttcttcatagtgtcagtctgtccacctaccatctctccatctgtgtgactgtccatgtacccatctggcatctatctacctatcatctatctatctatacatctccatcaatactatttgcatgaatacacacacatattcatagttaaaaatctagactatacacaaaatagaaggcttcataatgtttctctgaataggaaatgtctaaatacatttaacagattaaaatttccctcctaaatttacatagtttatttcaggaatagttttaaatgtgggcaaactaagtcgtgggacaggagttgaattttaccacaatttgttttaaagtgacttaaaactaataatggaaaatgaaacaatgttaccgagagagcttgacaattcacaaattcagatcttgctgtggtaagaatatgaatagtctttccagtcacatgagaaacattcaaagtccttcaaataatgatacttcctctcactatgtcagggccctcccaacatagccttgcctttccaaattaaattaaattaattaattaattaattactttatttgtttatttcctaagacagggtcttcctctgtcacccaggctggagtgcagtggcacaaacacagctgcctgcagccccaacctcctgggcccaagcaatcctcctgcctcagcctcccatgtcgctgagaccacagatgcgtgccaccacacccggctcacttttttagtagagatgggctctcgctttgttgcccaggcttgtcttgaactcctgggctcatgcagtcctcccacctcaggctcccaacgtgttggacttataggcatgaaccaccacacccagccacctttccaacttttcttcctgcagccccagctcacagatgggcactgggctgcttgttggttcttgatttccaccccttgctctacctactcagtcagtgtctgtgttttcgtctcatctcgacgtgctgcctcgctcagacaaatggaaccactgcccagtgcttatcttgcttgagctgggttttctttgtcccgttttgcattcccgagacaccttgtcttctgactgattctgcacagagcatagtagataacgtttgaggttcatttaatgtattcatgtgtccatcctttcttttattcagtgaacatctattctgagtctgcatgtgctcagcacgaggtgaggtgcagaggaaacaaggaagaccacggctttgtccctgctttcagggaacccctagctgctgagaagcatggatgcacagtcaagccgttatgagttacggggggtttaaagcaaatgcctgcggtgctgcttaagagatacttcccattatatatgtgtgtgttcttcagatgtgactacttcacataaatgtttagggggtacaggagagcacagctaccccacgcactgacaagaaggtccttttacattcaagtacatctgttttgaggtgaaatctgtttgaaccaaagtaatgggctaaattgtataattgggtctgtatctttcttagagagagaggggcagacaggttagtgcgggagaattttactggcaaggtgttaaagagaaaagatatgagtgtgcctctattaccagtaatacacggagatctgcaaattggttaataactacaggagaagaaagtgcaggaactgccgcctctgggtttcctttgccccatgaggagcgtgatgctagagttcctggtagaggcaaggaagaggaagtgcagctaataatttgaagatatttacacctttcctagtctgtttcacagtacaaaggcattagtgggagtgacaggaacaagttatagaccatttatttaggctatctggaaggatttaatctcacctgggtcatggagttgcgtattttctgggaattggggctactgtgatagccctatctgtaggcctggcatccaaagataagagtttaagtctggctggaattagaagcgacagaattagctagaacgcaagcctgaaaaccttttggttcaaattgtgaaatgcctctgggtggcagttccaatctgtcctgatggagcttcggctctgagagctaagcgtgaggcagacatcagtaacatcaaggacgtttctgcagtgtgcacaggaaatccagccctggatgatgcagtttatacttttcatccatcttaaggctccatcataatatgtctccagaagactaattttctacttcgtcagcatccgaatgtttattttttaaaaagaacccataaacatgtttgaaaggccagtgattttagaatctatgaggtagctttgtatagaacttgctcgtttatatcactttgaaatatcagaaatagaagttattaaaacataaaacagcagataatgatgatactagtgtatttcttagttacatataccttattagccccttaaactgtgtatttcagacttatggagtatgacccacatatgtatatttatttactaggtagtatcataagaccaacataataatgcatgcaattaatagattagcagtagacttacaataggatgggaactcaattgtgaatgatttaaaacaaaattttttataataatcaccgactataaatgttacttcgtcaaaacaaaatttattgcttcaactgttagtggtaaacttttttttcatttttttattttttattttttcattagactcactctgtcacccacgctggagcgcaatgacgcaatatcagctcactgcaacttccgcctcccaggttcagtgattctcctgcctcagcctcccgagtagctgggactataggcgctcgccaacatgccaggctaatttttggtatttttagtagagccggggtttcgccatgttggcaatctggtctcaaactcctgacctcaggtgatctgcccgcctctgcctcccaaagtgctggattacaggagtgagccactgcacctggcctattagtggtaaacttgtatgacctttttcttttctttgagacagaatctctttctgttgcccaggctggagtgcagtggcccaatcacagcttactacagccttgacctcctgggctcaatggatcctcccacctcagcctcccaactagcttgaactacaggcatgtgccaccatgcccggctaatatttgtaatttttgtagaatcggctctcactttgttgcccaagctagttttgaattcctgggcccaagtggtccgcccacctcagcctcccaacatgctgggattacaggattgagtcacggcatttgtctggcctttttctttctactgataaaattaaacaaaacatagtgctacacaatatggtggaggcagaagattcaaatatacctggattctctgtttccaatcaaggtgaataccctgtctgccctgtatacttttagaaaaccagacgatcggtgcctgcagagagttcacctgtccttgtgatgttcatttacatgaaaaaatagttcagtaagaattgcaaagcatttctagtaggtcgtaggtccctgcataatgggatcgcaatcctagacatatccacactttctacattttaataattctgtgttgatggtgatgtttgtaagtctgattttcatagtaaatctcagcttaagtgtttaaaagcctctttaaaccaaatgggagaagtataagctctattagtaaactgtatttattccatcttcttccatttttcagctcatttctgtctttttgtaggcagttatcggatgtaaatagctatcatctttattactaaaatgcatcctttaatcagatagcacatttttagatgtcatgtaactacaaagtatagttagatcatggccctgcccataactttaaaaaatgcttataatcatgtaacagtaatatgccttaacagaaaaaaaaaaaaaggatagcaagagaaataaataaatctgtaacaaaatgggatggtatttctactaatatgaatgatatttcaagaggtcccaagggagctagcaaggctatttaaagtgaagccacatggttgctaattaagaatcttgtattatactggcaagtgtaaatagctggaaagcaatgaggggtgcacttttgtggccacgaattaccaaatagaactcagactgtggcgtctgtctcttcatgttcactatgaatcatcaaattccatggtaaatcttagggtctagcattttccaaaccttcagcactagagaaaaacacatttacatttctgtcattctagataggaaatgtcagttcagattatattctgccttttttggcttcatattttgtctgaaacatcgtcctacatcattgcaaagttatcacggctctttagtcaaaatatcccggtgtattgcaattagacacttgtatatttgatgtcgttgtgtagctagagcttttgtaattttccatatgtaaaaaagaaagaaaatcactagaccataagagaatattaagagaaaatgtggcttctctgtatttagttcaatggataatatatataggcaaaacaagtgaaatgtaagcagaaccagtgacctcttcagtaatgttattgcctaatttaattgcttttttattctggtcactactttctgccactaggaaaatgtagggcatgctgattgagggataactattttaaaataaaatgtaaacagaagttttccagaaataaacttcaactggccaactatatgttacttgtgtctaaaatataaatccactataagtttttataacattagggtaacaatgtattaaaagtatgtgaagcctaacacgacttctctagacatacatccttccttataatgatctgatacacacacacacacctgtacacagacacacacacacacacaaatactgcgtggttcctcagcacttttaggctggcttatggaatctaagataccaccttatctgcctttcaaaaaaataacagttgattgacttaattttcctaacattaaattgaccatctttacgtgtacagtttagtagtgtattcatagagttgtgtaatcatcaacaccatcaaattttagaacactgccataattcccaaaaggaaagcctgtacacagtagcagtcacaccccatgcccctgctcacttccctcttccccgagtacctggctaccacaaattgactttgtctctatgaatttgcctaattgggagatttatttaaatggaaacatgtaatacgtggtcttctgtgactgcctgctttcgcttatgacgtttaaaagttcatccatatttgcgacttgtggtacctcattcctttttattgccaaataatattccattgtatgaatatactgcattttgtttatgtattcatcaattgatgggcatctgggttgtttctacttccttgctattagaaaaatgctgctgttactgatcatgtacgagtttttatatggacatacattttcttttcttttggatatatacctagaagggaagttgctggagatatggtaacactattttaaggtatgccactctttaaaagtggctgtaccaatttccctttctgccaataatgaatgagatttacaatttacctatgttcttgacagcacccgttattcttttcttgtttgttttaaattttagcaatatttgtaggtgtgaagggacatctcataattttgatttatatttccctaacgactaatgatgctgatcttcttttcaagagtttattgggccatttgtataacttccttggaaaaatgtctattcagattctttgcccattttttaattgggttatttgtcttctccttgttaagttgtaaatgttctttatatattctggacagaggttttttatgacatatgtgatttgcatttatttccttccttttggtgggttgtcattttactgtagtgatgatgttctttgaagaacaaaagttgtagttcagtgtgtatatgttgtctttgttcgctcatgtttttggtgccagatctaagtaccttttccaaacccaaggtcacaaaggtttactcctaaattttcttctgagactgttatagttgtatcccttgcattaggcctcttatccattttgacttaatttttatatgtaatgtgatgtaggaactcagcttcattcttttgcatatgccgtttattgaggggattatttttccccattgaatcatcttgttaccctgttgaaaacgaatcaaatatttggttgaacttaccaaggtatcccctggacctggacttttcttcttggcagttttaaaattagtaacgcaatgtctttacttgttatgggtctattcagatttgatatgtcgtcttcagtgagttctggtaggttgtgtctttcttggaatttacccgtttcgtgtaagttatctatttgttggtataatcttatcttttaccagtgaactatcaggatccagattgtaatctctttgttcatttcctaaacaaatacacaaaattttgactaaaattttactaagccaatttaattttttctaataaatgcaattatcttaaggattagaaagatataacaagtagcttagaaaattgacaaaatatccagtaaattttaaaactagctatctgttattcatttactgttttccagtgattgagaaaaacaattttttctagctccccattaactcggtaactgctgagagataataaggataatgaggtcacgtgatgaccctagctctcacccctttggtcatcagggtgccctaagaatcttcagaaactttcagggacatttatcttactgaatcataatatgggttcagaatcaatttagtccatagtcactatttttgtttctttgcccaattccctgttgaattatgagactgtggataatattgtgccctctctaaaggtcctcattgatgtgggacagggttagaaattggagcctgtactggattgcatcccttgcatcccctaatttgtctatctctttctatctttgcattctgatgactctctctcaagccagaggagcgttagtgctcctgcgtttaggaagctggaatgtccacgctgtgcatactctatttgcattactattgtttagaaattattggccgggcgcagtgactcatgcctgtaatcccagcactttgggaggctgaggcgggtggatcacgaggtcacgagatcgagaccagcctgaccaacatggtgaaaccccgtctctactaaaaatagaaaaattagctgggcgtggtggcgtgtgcctgtaatcccagctactcaggaggctgaggcaggagaattgcttgaacctgggaagcggagcttgcagtgagccgagatcgcgccactgcactccagcctggtgacggagcgagactccgtctcagaaaaaaaaaaaaaaaaaaaaagaaattattctctaagcacctgtaggccctccactcacccacttgaagcagaaaccatgcttcctttcatagggaagcacagtgcctagcgtaaagtaggtgctcgtttctggcccaatttttaaaaaaataataaaattctaatctgtgccaactccaaatctattttgatgaacttcaaatgtatatttgatttttctttctactaccctttccttaagggcattctcatgttctcaactcttttattaaaactgatttttaggaaagtttttgatactctttatattgatatcttaatgtaattttagtcattatattacaaccaggggcattttcatttgaaacattttctaatatcatggaatgagagagtctacccataggtgaaaaaggtaagtggtgcttacattaaaacaaaaataaaacaaacactggctctgccttggggatgtatctgtattttctgagcccatgtcagtgatgacctgagcactggacagctgggggaccttagaaaatgaggtccctaaatgaagtgagtccagtgaagtatgcaattgggaacctctgtggcatattatttgctttctaaagttcatatttccttgtattttcatatttgtattaatggctcaatttacgcttgaatttccttcatgtataattaattcttcagcaatttcattccacaaatacgaactgtgagcctgcatggcagtagactagtcactggaattcagacaaaaaaggtctgttctctcaaggaacttacattctaaccagagagaaaaatgtcctataattaatgcatcagtgatgtagttaagatggagataaatgctactaaggagaagtatttgaagagctgctagcattctcccagatgtgtctgtgaaggtgtccttttcaacctgctcaaccacatttttctctaatgttgtacagcctctccttgagatgctaatctttgtccagggatttagttttaatctccagtacctgatttgggctggctgtgggtttatctgttgataaatacagaaaaacatcttaacacatttttaaatgttgtattttgtagtgctgacactgctagtatggtaacagcgagtcgttttgctcctccatctcttcctctcttttctctccattggtgaaaaaggtgttaccttacaatgtgcttgtgtgccatggagttttctacactctcaaactacctgcttgtttcctcttttgcttatattcctagtcttctttgctttcaaaacaataaatctgataacataaagagtccactcatgcactcagagactctaagttttgagagatgcccagactaattctgaattcattaaaaatttaagatagttgagtgccaactagggtgccagcactgtgaacattaaagaaatgctccctaaagaatcatttgttaataggataatgaaagagtataatttttattaaaagaaaagggcattagtacattaattgtgagctgctctctgcttatttgccgtatgactattaaaattctcgaagtaacataaggagttctatggggagatttcaaagccttaagaaggaaatattagggggactaataggatggatagagtagaatggcaaatctttctcataggcactgttacatgacttgatcagaaccatctttgatactttatgttgcttcccctgtcacttttatttaacaataaaatctctcagttctgagaacaaaagtacttttaaaacaggtaaatttctgtcataaaagtgtttttcactgcagtgggtggtggtgagaacagtaagatgggaatgtaacctgccagcgctgattgagccaaccacccacctgatttgaaaagagtaacactcaacaaattcttggaattgactaatttgagaatacatgaatagtatcttaactcccctctctcacagttggtaagcatagttcataccaagttggaaacaaaattataattggtcttgccattaaatgaactcccttagtatgttatgcatttctttgtcaaatatctgctctttatgtcctccattaaattatagaataatagaatatagtcctgaatctcactcgtgtttgatttctaacatttaatacaaagtttaacacacagtagatgcatgaaaatcatttcaataactgaatagtcaaatatgtattgcttatttgaaatcatatctagattgaaagctattcattaatataaattagtaagttgataatacttgtgaagttagacaatccataatataatcatacttttaatttcaactcagttgtttttaggggtaggggtaattccttatctttcacctccatttatacaacatggtgggatttgtctagaattacatccatttctttgtgcaggcctatgtagggttttttaaaaagcctatctcgtatgtcccatttgggtttttcctcttaagacatctgtttccctatttccactgtctcactgcatgaggagtgagtctctctctttgtgtgtgtgtttgtggtaggacactgatcaactagtctgtatcaatatagcaatgagtgataatggaataacatgtcactttaaccttttttgtttgaattggattttggagactctgccttcacactaaatgaagttcaggttactgattgtaattccaggctatctgacagtacagagacaggaatattttgtcctaattgtgccttctatattatcattacctattttataattgaactttgcttggatcataattgccttataactgaagtttgcttgagtattttttaaatacacactatagagatgccacagttcctgtaactacagtacactcttagtaacacagagtataggaaaatttactaatgtatactttcattgaatatagcagtagtgtaacttatgtttgtagaaacataaataactcaggtatctctcagataatctgcatagctatagcaacagtataacacaattatttcattacattcataaatgtattatgattatttttgaagactcctataagtcctgttcttaatatccaaataatactaaatgataccaaaactacaattcctcagaatgttctacatatagtgaaacttacttcccacaactttattgaaagaaaccagcaacctgaattctttaacttgttctggtcccatggaggcagcgtcttcacgggcttcatgtacagatgttgactccacggagctgccttttcaatgcatgagtggatgtaggtcgcaaatgttaagtcaaatttaaagagattacaggatttggctttacagtacacattggtttggtgcaaaagtaatcgcaggttttgctattgcttttaatggtaaaaatcttttgcaccaacctaatattatattttatgtttggaaagagaaactatgacctaccccttcaaatattttcaataatatgtatctaatgcatttaatagtttttacctctgtcaaaaactaaatcaacattataattataatttctatttttatgagaatgctatgtgtatttcaattctttctaaaattattttttaattttcaattataatcaaattattagtgtccctggaaaaatattaattctagtaaccattccttcttaacattaaatctttgaaaaatgaagaaataccaacttttctatttttaaaatgctgtcaattcatatatgggttacagatatctgtctgcaggtatttttagttgagtgtcagaatttctttaacctgaaatgtaaatcatttctaaggtaaaagagaatgaagggtactgtgttttgtcaaaatccttctggcatcaagttattaactgtgtaattgataagtggattgtgactatttttaattcctaaaaagagaagttgaatctctatggtgatgatttgatgttctattactagacaggaggacctgtttagttcataatcagaaaaaaaaattatttctctttttggaagtaaaaacaaaattacaataaaaagcattattcatgctactctaataatacagatgttgtgcaagattcttatggtttggcttgatgaaaatgaaaacagtacaggcgcacctcactttattgcatgtcacttcattgcccttctctggtattgtattttttacaaattgaaggtttgtggaaacccggtattgagcggcaagtctatcagcagcaccatttttccaacagtatgtgcccacttcatgtctcagtatcacattttggaaattctcacaatgttttaaacctttgcattattattaatctgttagagtgattggggatctttgttttcagttaatagttcagactttgtctttcaaaagtatatggcgggtggatcacctgaggtcaggagttcgagaccagcctggccaatatggaaaaaccccgtctctattaaaagtcccaaaactgggtgggcgtgttggcaggcacctgtaatccaagctacttgggaggctgaggcaggagaatcccttgaacctgggaggcagaggttgcagtgagctgacatcgcgccactgcatccagcctgagcaatacaaaacagaataatttttttaaaagaatgaaatttattctaataattttagggtatgatcagtgatctttagtgttacaattataatagttttagaataccatgaaccacacccatatgagatggtaaatgaaattggtaaatattgtgtgtgttctgactgctccagtgaccaaccatccccacatctctctccctctccttgggcctccctatttcctcagacaacataacatgaaaattgggccaattagtcctatgatgggctctaagtgttcaagtgaaaggaggaatggcacgtctctcacttaaatcaaagctagagatgattgagctcagtgaggaaggcatgttgaaagccaatatagaccaaatgctaggcctcttgtggaaaacatttagctaagtggagaatgcaaaggaaaattccttgaaggaaattaaaagtgctactccagtgtagacaaaaatgattagaaagaaaaacagctttattgctgatatgaaggaaattttagtagtccagacagatgttgaaaccagctacatttccttaagccaaaaacctaatccagaggaaggctgtattagtctgttctcacgttgctgataaagatatacctgagactaggcaatttaaaaaagaaagaggttgaatgcacttacagttccacgtggctggggaggcctcataatcatggcagaaggtgaaggcacatctcacatggtgcccgacgagaagagagcttgtgcagggaaagttccccttataaaaccatccaatctttgaggctcattcactttcaagagaatatcatgggaaagacctacccccatgattcaacaacccccaaccaggttcctcccacaacacttggaaattgtaggagttacaattcaagatgagatttgggtggggacacagccaaaccagatcaaagacctgtaccctcttcaattctatgaaggctgagagaggtgaggaagctgcacaagaaaagttgttcagctggcagaggtagattcatgaggtttaaggaaagaagccatctccatcacagttcaagttcagggtgagtgctgatggagaagctgcctcaagttatgtagaagacctagctacggtcaatgatgaaggtggccacagtaaactacagattttcagtgtagatgacacagccgtctattggaacaagatgctatctaggactttcttagctagagagaagtcaatacctggctttaatgcttcaaagaacaggctgactctcttgttaggggtaatgcagtgggtgactttaagttgaagacaatactcatttaccattttgaaaatcctaggtcccttaagattatgctaagtttactgtgcctgtgctctataaatggaacaacaaagcctagatgacagcacacctgtttacagcacggtttactggatattttaaggtcactgttgagacccactgctcgggaaaaaacattcctttcacaatattacttctcaatgccagtgcacctggtcacccaggaactctggtggaaatgtatagggaagtgaatgtagtcttcatgcctgctaaaacaacacctaaattctgcagtccatggatcaatgagtaattttgactttcaagacttactattttaaaaaaatttcatgatgctatagctctcatagatcactaaagatcattacatttctctgatggatctggggaaagtaaactgaaaactttctggaaacgattcaccattctagatgccattaagaacttcatgattcatgagtggaggtcaaaatatgaagattaataggagttggaagaagtcgattctaaccctcatggatgactttaagggattcaagacttcagtggagcaggtaactgaagatgaggtgaaaatagcaagaacagtagaattagaagtggaggctgaagacatgactcaatttctgcaatctcataataaaatatgaacggatgaggagttgcttcttatggaagaacaaagtggtttcttaagatgaaacctactcctgatgaaagtgctgtgaacattgttgaaatgataacacaggatttcagacatgaaataaacttagatgatcaagcagccacagggtttgagaggactgactccagttttgaaggttctgctgctgtcagacagaatgacatgctacagagaaatcttttatgaaatgaagagtccatcagtgcggcaaacttcattgttgtcttattttaagacattgccacatccaccccagctttcagcagccatcaccctgaacagtctgcagccatcagcatcgacgcaagacctgccactagcaaaaaaggttatgacttgaaggttcagatgagagttaacattttttagcaatgaagtattttttaattaagacatgtccattctcgttttagacataagactattgcatacttaacaaactacagtatagtgcaagcatactttttgtgtgcactgagaaacctcagctttgtgtgacttgctttattgtgatatctgctttattgcagtgatctgtaactgaacccacagtatctccaacttatgcctgtaactaacattacagtgttttagggcggaaaagaacttttcatgtgttttgtttgttttatcctcaccaaaatcttacaggatatcgagagctgatactatttcttattttacacctagacaaacctgagcattgtagaattgaaattacttgcccaagggtacaatttcatatataaataatgaatcttgaacttaggtacttttcttctaaattctgtatttttctattgcactctctctttagaaatcatctcgattcaccgggttctaataaacacacaggatgatagtcattattctgaatcttcatttgaaactgagaaacttgtttccatcagtctcagttgctggggaagaatcctagggaaatgcagtcaccagaaaatgtccagcaggaaagcaaaatgtgtcaacctggaccttaagatatatgtgcttgtagtaggcaatagcacagagcaggtgaggaatatttgagaaagttgagaattcatttttccaataaacataacctaaatgcagcattatactaactgtaaatgcattactctcattaaacattcctgagaccttctgattgaaagaccctagaaagtaaaaaaattttctaagcagagaaagtttccaggaagattcaaaatcacgcataactctatgtttccttataggtgtgcctgtggatttctatgtagagggtgacaataaggtgggtggagagaggtggggaaggagggaagtgggcagatgagaaaagactccctgagctgtgttagggaccagggagcataaactgtcctgaaataagggggaaccatgagaggggtttaaacaggggatgggcagggttttgtttttctttggaaatattcctccggcaggtatgtgaatacatttgagagaactgagaaggacagcacaaaattagttgacaagttactgcagtcatccaaaagggagtatgatgtatcaaaataagatgctggctttgggtatagaaaagaggacaccgatttacaaattacaagaacaacagctagctagaggtcaggatttggagaatatgaattcccttttgagttgggcaacggagtatctgcctattctgtctgtagtgttgctaatggttcccaactatcgtccttgcttttccaaatagattgcttcatttccttgagatctcagactacaaattcgtgttccgctacaccttccacttgaccttgttctcatagaatgatgctgtcaggggctgtggagctgtgaacagcgatttccatccagcttctgaaaaggctcgagtgctgagctttgggaatttcatgttaacttttctacctccttcatgactgtgaggctatcagctgtcaccgcttatgagttccagaatggcaacctctgatgacttcaaaagaaatttgagtcacgtaagactttgtgattttgtgtgaagacagactgtaaaggagggtctgatctattaaattaaatcttacctaatcttttttaaagtatttattaattattaagtattaattattaagtattaataatcttgcttagtaaccctattcttttcatttaatggctccgagttgtgatgtccctatcttattcacaccaggagaacagaaagcctttacaagtttatggtttgtggcacacgcatttattcccaatacattatttatagttttcttgataaatacccaatacagctctcctttgcttagtcattttgaggtaacagggaatcaaaatgaggccctgcaaaattgcccagaaaagtggcttttttatcaaacttaaaaatgtttgacactaagttctaattaaaatataactgttttcttggccttaggtaagagaatggtaaatgtcatctaaattagctaaaattaagtaacatgatttcggggaaagatttccttaaaccagagcataatttgggataacaagcaagctctgtgtttccctttgttttttgattcctgaataatatcacaattactaatacttctatgaataaatgtattaatatggcatgtttcaagatcaagtatgaacatgcctcagctttcagactgatctcaagaagcatagtcagatgttagaagccatgggatacaactgaacaagtgtatccatgcactaaagtcatgagaagttaaaaccgtgaaaaatgagagaacgttgaatttcttcagatgctgagaacccatgatctgttggctgataccatacatttttttaatgaagccagtttgagctgttaacataaaagacccaaaggtttatggaatatcaaatttcaacttatcccatatgctataatcagttgaaatgtaggtgtatgctagtattgtgaataaaaaataattttttttttttttttttttttagagagagagtctctctctgttgcccaggctgctgtgcagtggtgtgatcttggctcactgcaacctccgcctcctgagttcaagtgattatcctgcctcaccctactgagttagctgggattacaggcaaatgtcaccatgactgactaatttttgtatttttagtagagacagggtttcaccacattggccaggctggtcttgaacttctgatctcaggtgatccacccgcctcggcctctcaaagttctgggattacagacctgagccacagcgcccagccatgaataaaaaataaacattttaaagaaaactcttaattttttccttacctaaaccatcctggatttttcatttttgttaaaaattaatcattcatggaatagataaaattagtagtgggagtggtgggatgggctattttgaaagaatactcagctaataatcacaagcaatttataagagacctcctccaggtccctctattttacttgcactaatttttctccatcaacaaaataaacagccataaagtggcaaacgtgcatggggcagtagaagtgcagtcatgcattgctgaactgtggtgggataggttctaacaatgtgttgttaggtgattttgtcattgtgcgaacatcatagcatgtgtttagacacagctagatgctgtagcctaccagacacctaggctttcagagcaagagaataggtcagcctattgctctgaggctgtaaacatggacaacatgttactatattgaatgctgtaggtaacagtaatacagtggtaattatttgtgcatttgaacaattttcaatgaactgtatccttccatcttttgaaccaagagggaaatggatgttgggtcaccagcctccatgtctgccacgttcctggtgaaggtagtctggggaatctgagcacgggtttgcagtcccaacagcctgcccactctcttccctctgactgaagtgacacactcatcatgcagagagtgtgtggacggcgttgtggatgagtgagtgaagaagatgggagttgcagttctctgagcaatgacaggcatgtgggggaagaaaattgttcccctgaaaatattattatgtcaaaaagttaagaaagtcaatgatttataatcaagagcttatttgttcttcagcaacaatcttttccacttcatttgatgaaatccatgtacattgcaagagcaaattttaagaaaagttggtttattaagtcaaaaacatcgatctaaaaggaggataaatgataaaataataatttggggaaattcttgcggaaacctgtgagaaacttaaaacgtttcagaataaactgtagctggtttaaatcagtgctaagaatgcccagatgactacaaatttagttagttttcacctaaaattaagacttcctcttctctctgattagatcataaagaaacaggcctgaatgatttttagaggtgattggactttgattataacacaatcgggggaaagatagaagagaggaaacaagaaagaggcatcggaatatcttgaagtgaaaaggctcagagggaaatttatagactagaacatctatacaatgtgtattaaaccagaccatgttaaaacaaattaaaaaatatgtatgtctttgccaacatacttgtccaaggacaaagtgactcttcttttggccaaatcttatttggttttttttggattaagaaggccttccttggctgggccaggtggcttgcaacctgtaatcccagcactttgggaggccaatgctgggggatcacttgaggtcaggagttcgagaccagtctggccaacatggtgaaaccccatctctactaaaaatacaaaaattagctgggtgtgggggcacatgcctataatcccagctactagggaggttgaggcaggagaatcacttgaagccaggagatgaaggttgcagtaagccgaggtcatgccactgttctccagcctgggtgacagagtgagactctgtcttaaaaaaaaaaaaaaaaaaaaaagcaagcctttcttttttcatgtctacaaaccccaggacagtaaggggcaagaataggaacccctgcccacaatgtgtacggttcagtgaaaagatggggataaatgtaccttataaatacatggtagcatcattagctctcagatgattggaagcctgctcgttacatacgtgtttaatgtttcactggggggcctaagttctgttgccctttaggacccttgaaaagcacttttccttatagtccttgctaagtccttatctagccagcttcttacttcagtgatacatgcctttctcacctccaccactccaaaacgttgttggagtggtcaagatagttgttgaccagtggtcaagatagtcagcccagattgatgatacatattcacgggcagtacattatatagaagcaatagaaaattaaatacaatgtggactttttataattttaaccataatccgatgtgatttgtacctttccctttcttaaaaataaatgcaggcgatcaagttaagttttatgtggggagttagagtactatactacacaccaaaatgtgatgtgttattcataaagcttaattttgagaactaaataataatatttctatgatgatgatggtatctgagcattcactagaaatctaataaacttcttatttaataagcatagttgagttccagtcataattatcaagatcataaagccagctgaggtaactatgaatctttatatgatgataaatattattcaaatagatttacatgccatgaattgaaatgagtgctaccatctcaacagctagaaacatattttgctgcctgaaactgcctctaatctgagctacagcaaactttcctccatgcaacagccagactatttttagtaaaggaagcttgaacagacgaagataatcatatggttctcctaaattaaatccgttaagagtgcgttcatgtgaatcaccagatctgtaaggctttattgtctccattgtttaaattctatgaaacggaacaacaaaaaaaatcactgctgtttcaattctgctatccctgtgatgtacctacagcaaagctgtcaacacatagtaatataactgaaggcatcttgtggttcaggaatagtttggtgactggaagttgtgaagggggaaacgcgttgttggcatttcattggtttaacataggtacaccctgcatggagggactcggtaagtaatgatggtgattgactgtgtcaaaacccagcggagctgcattttcgtggaggacgagtcacttcacttacactaatgagaattattcttaagaaatgtgacttttttttatatatatactttaagttttagggtacatgtgcacattgtgcaggttagttacatacgtatacatgtgccatgctggtgtgctgcacccactaactcgtcatctagcattaggtatatctcccaatgctatccctccccctccccccaccacacaacagtccccagagtgtgatattccccttcctgtgtccatgtgatctcattgttcaattcccacctatgagtgagaatatgtggtgtttggttttttgttcttgcgatagtttactgagaatgatgatttccaatttcatccatgtccctacaaaggacatgaactcatcatttttatggctgcatagtattccatggtgtatatgtgccacattttcttcatccagtctatcattgttggacatttgggttggttccaagtctttgctattgtgaataatgcggcaataaacatacgtgtgcatgtgtctttatagcagcatgatttatagtcctttgggtatatacccagtaatgggatggctgggtcaaatggtatttccagttctagatccttgaggaatcgccacactgacttccacaatggttgaactagtttacaatcccaccaacagtgtaaaagtgttcctatttctccacatcctctccagcacctgttgtttcctgactttttaatgattgccattctaactggtgtgagatggtatctcattgtgattttgatttgcatttctccatgtgacttttttcttgtgataattttctcagagtgggtaaattatggtattgagtattagattatgaaatgcttgctttttatgataccaaacacgtttttgtattggaagtgaattatctgccaaattatgttttaaaagctgtagagggctgagggcagggcatcaagcctgtaatcccagcactttgggaggccaaggcaggcaggttgcttgagcccgggagttccacaccagtctggccaacatggcgaaaccttgtctctacaaaaagtataaaaattaaccgggtgtggtgatgcacgtctggagtcccagctacttagggggctgaggtgggaggatcgcttgagcccaggaggttttggctgcagtgagccatatcgtgccactgcactcaagcctgggtgacagagcgagaccctgtctcagaaaacagacacacaaaaaacaacaacaaaaaaacccaaagctatagaggtagtacttgggaaaattttcaagaccagctgagatgttctgtttaggcagccattgagttaacttggcagtactgagtaataaatacaggaatagacacttgctctggttaacgctgaggccaacagcagctgcagcattgtgttttaagttcacttttacttgaaagtggtcccaggtttggggttgttataaagtgagtaagcgtgagtacaattctctctcctatcagacggtttcaagactaccccttgctccattcattcatttactactatctgtgtgacctgtttgctgtagcttcaatggttttcacattaattagctcatttgttatcttatttgaccctgagctcttttggcctgtacccacactttacagataagatagtgaagcatgaggatgttaaatcgatgaggtgatactcaagtgaaattgcatcctgaacttagatcttctgagtctttctctactgagttctttccatgatgatattgttctactgtggttattcagcagtacccactaacgtttatcgaatattcactatgcgtgtggtattttgctaactactttatctcatttaactatcagtcctgtttgttacgtgcaattgttatttccacattacatatcataaaattgatgttcagaaacacccccatcctgacttggctggtagtggccattagattcgaaacccagtcattctgataccaaagcacaaaaccactgtttatcatcttgacatcctcattgctttgaaatcaggaacttgtgtacattacagttacatgtatattacaattgaattgtgttatcaagactagtggtatggatggagatatttaggaaattgcacgaataaaaatggattatttatggattaattgtcagtatctgagaaatcatcttgtttgggatcgatattccaagaatcaggctcagggcttgtggaattttcttctgttctccatgctcagaatactacttcttcccgcaaaacctactgctgctactcattcctctgctctcagcttaaaacccagctctctcagaagtcgaggtctctcatccctccaatataccctcaaagagtctcagtattaattgcctgtttaatatttttttttggacggagtctcgctctgtcacccgggctggagtgcagtggcgtgatcttgggtcactgcaacctctgcctccctggttcaggtgattcccctacctcagcctcccaagcaactgggattacaggcgtgagccaccgcgcccagcctgtgtaatcacttttatcctcctgacgtgcaaaagtctctttcagtattccatccccacaatctggcaaaatgtgtgtcactttttagatgctcattatttgttaaaggaattaaaaaatcaatgacttaaaattagcaacaatgaatgctttttcagaactttatgatagtgtttggtagtgattccaaacactaggagaaatgaagagtgtctttgagaaactagagtaattaagtaaaataggttgggtgcggtggctcaagcctgtaatcctagtactttgggaggccgacataggtggatcacttgaagtcaggagttcgagaccaggctggccaacatggtaaaaccccatctctactgaaaaaatacaaaaattagtgggtgtggtgccatgtgcctgtaatcccagctactcggaggctgtggcacaagaatcacttgaacccggcaggcagaggttgcagtttgccaggatcgcagtactgcactccagcctgggctacagctcgagactccatctcaaaaaaaaaaaaaaaattaaattcagtaaaataattggaatccactgataagttcacagatactgtctgcccatgcccatgacctgatggaaatttaagagggatcctattggaacttttggagaaccagaagaattagtgctgttgtattgtttaggtgtctgtaaactatattccatgagatacattactgtttcatgatatttaaattatctaaaggcctttaataaagcatatattactaaggtactttgaataacaataaaggaaaatcaaaatgggccacattgtcagaaagtggggaaaatgctgggaatagagtgacaagagatgaggctaagaagagctgatctactaggaaggtgtttggtgctgtctctgcccccatttcacagatgagggcatggacagcaccaaacaccttcctaagggtggcagtgctcaagggcacaaaatattaaactgcaaatgtcgaataccgtccagtgaaatgccagatgaaaacgtgacacgatgtgctgttagaattattttctttaaataccaacctcttttagcacatctgagctctgtgactgcttcactaatagaacatgttagaaatgacactctgcccatttccaggctcaggccttaagaaactggaagtttctacttcctctctcttagggtagtcacctttagaaagcacctactgtgccctagggcagcggtgcccaagccctgggccagcaggggtggcctgttaggaaccaggccactcagcaggagataagcagtaggcgagcgagcattacagcccgagctccacctcctgtcaaatcagtggcagcatgagattctcctaggagcaagaactctattgtgaactgtgcatgtgggggatctaggttgcacgctccttatgagaatctaatgcttgatgatgtgaggtggaacagttttatcctgaaaccatcccactgggtccctggaaaaactgtcttccgtcaaacctgtgcatgttgacaatgacagacaactaaaaagattgggggccactgctctagggcacccccttgttaagaagaactaagaacaccagcccactgacctcagcttatattcagcatccactcggccatgcaaaagagccacgttgaaaagaaaccattcagtcccactgaaccatccgagctgaccccacatagagcagagtcaaacttacccagctaactctgcccagccttgtgatcacacttttactaaaatatgactatattttccaagaaaagcatggacttcagttgttctattacaaaatgagggaagatccttgttttgatgattaacaaatcgttagataaaatggatactcttatgaaaatgcatgatgtaatcatcaagatatacccaagtagttacatgtgagaacccagtgaatacttgggcttggggccagggttttgttgggaaacagttctgcagttacacatgaacaaattatcaacacatgaccaagtaatccatgtgtggctcagagctctatagaacacagcattaacagattttcactggaaatcaaggttggcttgggacatgtgaaagcgatttgtagacaaacctgttttatactaatgcaaggtgatgccattgccattgcttttattatgatcatagtctcttggagactggctggaatttacaaaaatcatttttgcctctcttgcgtcctgtataccatataaagttttttcaaatgagggatttttcattattcatataatatcaaaatcagaaatgaaaaatattaataagaactagattaggtgtcttcttaagatcttctcttaattattgttttccttctaatatttgttttaaacaatttgtagagataacttggcttacttaggaacaattaatcctttctatttctttctgcagaattaacttctgtaaacttctatttctttctgcagaattaaccgtagtgagccttttagttaactgcttctataatacgttcttgctctaagaaatcatagggaataaattcaagttagaaaggaatatatacactcattaaagcaagacatgtttctgtttgtgtaacatattctaatcttgtaaagtttaacatgccagaataaacagaaactcagtttctggttacatctggtatttatttcttaatatctcctgtattagtcaattttcacactgctgataaagacatacctgagtctgggaacaaaaagaggtttaattggacttacagttccacatgactggggaggcctcagaatcatggcgtgaggtgaaaggcacttcttacatggtggtggcaagagaaaatgaggaagaagcaaaagtggaaacccctgatacacccatcagatttcatgagacttattcactatcatgagaatagcacgagagagaccagcccccatgattctattacctccttctaggtgcctcccacaacacgtgggaattctgggagatacaattcaagttgagatttgggtggggacacagccaaaccatatcatctcccaagctataaaatgacttatttgaaattttaaaaggaggactccaaggaagtgttcaaatattcacgtacctaaactgaaacatgtgtttatatttttgaaaaatagcctgagtacttgacaactaatgttatatattgagttaccatttctgaaactttaattttatgaaagctccttctcctaatttgttaaacggggcatggacagacatgaagatgacccccacccccccggcccagtgacctcccaccacctcctgtacatgctcatgtgaaattgctttctctaaccaagaaaatacagcaaaagtgatttgatttccctgaccgtgccaattatgttatctaagacttcccctgacgatattacttatgatggattcagtggagactggagcagaccctctccttgttgacttgatgaagtgaactgccaaggtgaggaagctcacatggcaaggaacggcaggaggcctccagccaacaggcagcagaaagccgaggcccttgtaatgacagctgcaaggaagttaattctgccaacagcctgagagagcttagaagctagttttgctgtaatggagtctccagggaagagagcagcccagccgacatcttgactgggcctcatgggactctgagcagaagtcacaccaggcctgccccacagaaactgtgagatcataaaagcatgttgttttaagcaacaaaattgtggttatttgttacacagcaatagaaaagaaatgccaagtataatgtctcatatgatttctgagataaatgaagtaatgtacctggaaaaacctgtcgataataaagactttaaaagaaaaacacctacaaaactcaggaaataactaaatgaaaagcaggttatcagcaaagaggccaaaggagtataaagatattgacatatattctaaaaatgtatgtccgtacacatttcttgtaacaaaatcttaacttggtggtgttttcataattagtaaatgtagttactgatttcctacccaccagataggaaaatgtccaccatcctgacatgacggtgacatctgtccgacatcggcctctgaaggaaagagatacagttagcaaggatttcactgtagttcatggtaaaacagtaaataaaaaatgcttatttatttgacatgtattttttaaaactgtgtctgaaaagtgaacaaaacaacaaatacttttatgataaatggactttgttactttgtaaacttgtagccttggacatatctcagcatctccaagcctcagtctctccatctgtaaaaaaggctgtggcactgcccaccttgttttgtttataggtcactagggatgaggtgtacatatggtattaactatggcttctggcaagtggcatatattcgttacaccattgctctttttagaaagctaagtcatcatgtgcatgtcgcgtgtaatctgctgaaataaggatggactatagaacacatttggtaaagattttcatcaaaatgatcaatgcttttttaaaagtttgggttttatggtcaacttctgtaattgtaaaaactcatgaactcataaataaggtcttattccctgatgtattataagtaatattttacttttgtcttccaaaagacttatttatcttcctatgtcaacatcctcatgtatgtaaaagaaaattcttgttggtttcttagatcatagaatattgctactgttttgtgtgctccattgatttttctatcaaaacaaagttaatttaattgtaataataatgaccattggatttgacagtgaatatcttaaaaattcaaagtaacagtgacttatgtaatgtgagagttcagtttttctctcatgtaaaagtttagataggtggttcaaggctgctgtggcacttcatgatgacaggaacccagactctttctatattgttgctctacgttgtataaccttgaacttgtggttcaagatgcactatgtatattacaaacaggagagaaaaaaaaatggatgaagaaaaggacaagtagaagtttccacaggacacctctgttatatcccgttggtcatcacttacatggccagtcaggcaagggaagctgggaggtagagtcatttttccagggagtcatatgctcagctataaatcagaaattctgttaccataaaagaagagaggagacaactgaaagcttctgccacaacataaagacaaatgtctgtttcacctggataatgtcatgtgatctgtatcagtgattcaattaagtattttaagaatgtcttagttctttttgtgctgctatattagaattcctgggtctgagtaacttaaaaagaacagaaatctatttctcacaattctggatcaaggccccagcaggtcaaggcctggtctctttgcttctaagatagcaccttgaattctatgtgctccagtagggaggaacagtgtgtcctcacatggtcgaagagcagtagaaagagaacccactcctgcaagctcctttcttaggggtattgatccattcatgcaggtggagcccttgtgacttaaacgctttccattaggcccccctcctaacactgttgcattaggaactcagtttccaacacatgaattttaggggacatatctagaccatagcaaagagcataatatatgtgttctaatgaacatatatgttagccacagctaatatgtgtttccttaaaagagagagagagaaaataaaggatggccttttaaggatttgtgtgatggttagtattaggtgttgacttgattcgattgaaggatgcctagatagctggtaaagaattgtttccaggcacaacagatgctggagaggatgtggagaaataggaacacttttacagtgttagtgggagtgtaaattagttcaaccattgtggaagacagtgtggcgattcctcaaggatctagaactagaaacaccatttgacccagcaatcccattactgggtatatacccaaaggattataaatcatgctactatcaagacacatgcacacgtatgtttattacagcactattcacaatagcaaagacttggaaccaacccaaatgtccatcaatgatagactggaataagaaaatgtggcacatatacaccatggaattctatgcagtcataaaaaaggatgtgttcatgtcctttgcagagacatggacgaagctggaaaccatcattctcagcaaaatatcacaaggacagaaaatcaaacaccgcgtgttctcactcataggtgggaattgaacaatgagatgacttggacacagggcagggaacatcacatactggggcctgccatggggtggagggctgggggagggatggcattaggagaaatacctgatgtaaatgacgagttgatgggggaagcaaaccaacatgtcacctgtatgcatatgtaacaaacctgcacgttgtgcacgtgtaccctagaacttaacatataatttttttaaaaattgaccaaaaaaaaaaaagaaaaagaaaagaattgtttcaaggcatgtctgtgagggtgttgccagaggatattgaaattcgagtcagtggactgggtgaagaagacccatcctcaatgtgggtaggcaccatccagtctgctgcccccatggctagaacaaagcaaaccaaagaaattgggataaactggcttgctgagtcttctggcttccatctttctttcatgctggatgttttcattcctcctgcccttggacatcagactccaggttcttcagcctttggactcttagatttacaccagtggtttgccaggggctctcaggtcttcagccacagactgaagcctgcactgttggcttccctacttttgaggcttttggactcggactgtgccactactggcttctttcttcctcagcctgcacacggcctatccttggacttcatcttgtgatcatgtgagccaattctccctaataaactccctttcatatacacatagatcctattagttctgcccctctgaagaaccctaatacaatttgattcaaccatattctgccagattctttaccactgtggacttttctctgagcatacccatggtgtattattgtaagagacttttaggatttcaaattgttttctgtggggagggcccttaagggcatcacatgggacaaagagaaaagaggccattaatgagaattctggggactcgtccttcttcttcaaccacattgggtcagctttatttgttttatgtatttggttactatagacaatttcatgtaatgaaagtaccctgcttaaaagaaaatgtaactttgaaaatacagatttttcagttttcattattttacagatgagaaaattaaagtctgacttaattattcttgtgtattcactatgtttaggtaaaacatttatctattcacagcaaagcacatagatatatgtaggacacagtccttgactttaagagttttgtagcctgatgatgaaggttagtaaccagttcaaagccctaggactggttagtcttttgtgttgattggcagtgacttggattatcttataacagaaatcacagactattgtttccaaaagctaagaggaaatcactgaaggatgggataggagattcagtctattattttaaattatagaacaatttacactctacaaaatgcactgtgtcaattctaaaagcttcgacagttacatacactcatgtaactactaccccaaccaaaatgtagaacatttccagaaagttcccttatctctttttctagtcagtacctccccattccaaagataacctcttctgatttttatcaccatagattaatctttctttttgctggatttcatataaatggaatcatataatacatacttttctatggccagctccttttggtaaatatggtgttttgtttcgagactcatccatgtggttgtgtgactcagtagctctcttttcatttctgagtctgccactatgtgagaccccatggtttattctagtcactgtcaaaggacatttgcttgtttccaggtttgggttaacatgagtaaggctgtgatgttagatgcttgtacgagtctatgttgctctgtgtgtgtgtgtgtattttcatttttcttggaccaacaccttggagtgaaagtgctgagtcatagtttaactatatgtttaacgtaataagaaattccagggctgcgcgctgcggctcttgcctgtaatcccggaactacgggaggccaaggcaggcggatcttttgaggtcaggagttgcagaccagcctggccaacatggtgagactctgtctctactaaaaattcaaaaattagccgggtgtggtggcaaatgcctgtaatcctagctacttggaaggctgaagcaggagtatcacttgaacctgggaggcagagtttgcagtgagcggagatcgcaccactgcactccagcctgagcgaccgagtgaaactctgtatcaaaaaaaaaaagaaagaaattccaaaaccgttttcaaagtggttgttttatatttccaccaatgatatatgagagcgtttgttaatctttatcctcaccgacatttagtattatcatagtggctaaaatgtgaaatcaagtgaaattgtatcttgtgattttaacttgtattttccctgttattaatgatgttgaccatcgttttatataattattggccacttatacgtcttgttttgtgaatagcctgttcaaggtttttgcttatatttaactggtgtgtttatgtctgtattattaatgtgtcctttatattagctctttataagctctgagattacttattttacaattatatgtattactaatattttcccaagtctgtggcttgcatagtcatattttagtgtttttgatgagctctaatgttcattgaaattcaatttatacattcctttatgtgggattagagccttctgtgtccttacaagaaggaagttctacctgttccaaggttataaagaagttcccatttgctttctgtattgagtgagatatttatattcagtttttcaagcaacatttgctacagagagcctctgtctcttattgagtttccttgtcaattgctcagttcattgttttccttacccactttattgagaataatttgtgtaaatagactttctctatttgaagggtacaatttgaggagttctgacaagtacataacaacgtaaagccaccagcacagtcatgataaagaacatttccataccctctatatttgtctgctaggactgccatgacaaaataccccagactggaaagcgtaaacaatagaaatgtattttctcacatttctggcagctagaagtcgagatcaacgtgtgtcagcaggcttggtgttttccaaggcccctgtccttggcttgcagatggccaccttctccccatattttcacatggcctttcgtctgcttttaaggacatcagtcatattggattgggactcaccctaatgacctcattttaacttaatttcctctgtcaagacctatctccaaatgcattcacattctgaggaactgggggttagtacttaaacataaattttgaggggatgcagttcagcccataacccccaaaataacccttatgtgtttatgtggcttgttcccactctgtgctcccagccccaagcgacctctgcatttcatatacatggaatcatgccacatattccatgtttggcttctttcactcaggctgattttgagaattgttaatgttgttgcatttataggtaacaggacactgcttattcttgagtggtcatccactgaatagtcatactacatcttgtctatccagtcagatgaaatatttcatagatatgtgggtgccctccagtttacatttgctatgaataaaattgttaggagcacttgcctgcaacattctgtgtggatatattttcatttatctcacatgactacctaagagtagaataactgagtcatatgttacttttatgtttactttaaaaaaagaatgcctagtagatttcagcagtgactatactattttccatttgcaccaacagtgtgtatattccagttgtcttccaacttgcctgtcttttacatgggcattttcaaaaatcttactcattttaatggatgtgattggttcatttgtaataccatttttttgtagctactatagaaagtctacaagaaaagcgattattctcccttttttataactgcagtctcagggtttaagagcaacaataaatacttggtaagtggatgaatattttggtttaacgaatttttttcgttctttttcctggttactatttaatgattgcatttattatgctgctgctctaaccacggcactgtgcttggctttgtgacagtgtaggatctttaaatcaaatgaaggaagatggatgctcagaacagtgtcagtgtctactatatgacagagggcgatacatgctttagaagagttataaacagcatgctgtagaaagtgacatgatcctggggagggctggataatagggaaattgagaaaaaggataaattcagaaacccactgggccgtgggtccaggtcccttggaaagggcttcttactgctcagtttttactaaaccaaaaataaccctcttcaggcagttctattttgagaaataagaaataatacttgtaacagttgccatttttttaactctctatgtgccagcaactgtgtaaaggcgtttgttgtgttgcctttgcacagtgttgtttgtatttgtgttgtttcatttaatcttcatgcacactctgtgaagtaggtatttaattccttacttttcagatgaagagtactaagtttggaatgggtccatgcaactagctcgggaacatatagctagtcattggtagaaatgaaatacaacaggtttgtgaacttcaaagctccttctttgtatcattttgttgcagacacagatagaaaaacatcaagggaggactcaagcttctgggtacagctttttcaagatagttttgctgttgttgtattatgtccttagtatgatttacaaaattattttagtccctgacacttaattatgtggcttaaatgtttgtggattattcaagagaatatttgaaatccttcatattcgatgacaagatgagataatagggtaagtatagtttaagtaaaattactattaaataacatttttcaaaaactgtaaatgccatggttttctattaacattttggaaaatagaattagcaatttattttaagcatcaatgcatatactcacatatgatgagcagattatagcatttatttagataactcaagaaaaatagttattttgttttgtcagtctggactgtgtctgaataatatttggatatgaaatagtcagttacatacttcaattttccacttttctgggcattgaaagacatagccaaaatggctttcagattatgagttctagaacttttgaaaataaattttaaaacccacatgttacagattttatcaatgctttccctctgtggggtcatttttctgtatttctgatttacatgcatcatatagacgtgtttaggtaatatttgcttcacgcttttctatagacagtaacattagtcaggaccagtcctcaaatgccatctctagttgtcattttccacttactgatgcaaacaatttgatgaatcccaggattcaattgctgcttctctatcaccgtcttctcggaattctcaggtcaacagcactaaggttttcattgtaatttctcacttgagacccaggacatacctactcatacaaacatatgcgattatatgttagccaaagtgctgccacaatattaaaaataaaagagtacttttcagtatgagtttggaaaatttaatttgctgtagatcaggggttggcaagttttttctataaagggcccgacagtaaacgtgataggctgtgtggttcatgaggtctgtgttgcaacagctcattgtagcatacaagcaaccatgctttatgtggctatatgccaataaaactttatggacaatgaattttaaatttctcatagttttcatgtgtcacgaaacattcttctttttgtgcttttcaactattaacaaacatgaaaacatttcttagcacagagtctgtataaggtgggatttggccagcagcccatggtttcctcaccctgctagtgttgctaaaataatttatatatttttcttggttatcgtcattactaggcaaaaaaaaagagaacgttctctaaaaaccagccaaatttttcctattagactatgtgacattttattcagatatctttctctaattcggtagatttgagggatgaaatagtggttttgcttctctaattgacgtattatcatccatagctcccttctactgccatgcatttttgcagtcctttttaatctgaagacctttcttgctactatttaaaaactattaactataattgttttggccatgcaactcttaaaacactgtgttcaatgattaggcaattaaagttttatgttttccaaaatttgacaggagcacagttaaatctgctttgtaagggtataaattcacttggacagttgtttctgctttcaggatagccatagcattcacactattagtgtgagcagctgcataaactaacatctattttactgtgttaaagtcccagattcaaaagaattccattcagttttactacttacaccattgtgttatggtttgaaatcaagaagaatgtgtgaatgagttttctataatgtctctgtagaacacgaatttgtcagataacatagtacctgatgtggcaattacgggaattgttccataaatattttagttgctattagggcagtaaaaatttaaatatgaaaaaataaacatctgtgatatgcacagaaaagtctcactgaattctagactttgaggtaagaagtcttactctgtgaagcaaaatataactgggccctaattcctgcatttaattattggtgctacttcttttttttttttttttttttcttgttgaggcagagtctcactctgtcgcccaggctggagtgcagtggtgtgatctcggcccactgcaatctctgcctccctggctcaagcgattctcctccctcagcctcccaagtagctgagattacaggcacccgccaccatgcccagctaatttttgtgttttattaaagacaaggtttcaccatgttggccagggtggtcttgaactcctgaccttaggtgatccatcctcctcagccacccaaagtgctgggattccaggcatgagccaccatgcccggcctattagtgctccttcttggctgttgccacgtaggtgtgttattgaccattgcatgtgtcatgagtcagtcagaaaaaacttccagagaagagaagcaatgttgtcccatttagttaatggttaaccacagcgaaatggatttcttttaaacgcagggacttttcggtgcctcaagcacagtgtggttcactgggaattgccaccagccacagtatgagagccagagcttggcacaggcatctggccagagatcaccttgtccctggaggcgagatgacctaccatcccagggagcacggctcctgttagagctgtcagtcaggttacatcacaaggcccgacaattacctaattatcccctgactcgtttcagaatgatgtgacaaccttgcagggatacatgcagatgaaaaccaggaaaaattaaattagatgaggaaagggatcaaaggaaagtaatatgaagccaagggtaattttggtaaacgaagtgtgtattatgatttatgtaaaattgcaagagctggtccacaaatttgactctaaagttttcctaattgtctaaaaaagagagaaatctgatttgtagtgtccgtaaaggtagaacaaatcacaacctacagagaaacagacattaaaacaaacaaaggggcaagatgtgccctctgggttcccctcaaaggatttgcaatttgccatgtaatttgtacattacatatatatttaataatcataattaaaatcctctgttgaatatgggaattcaatataataaaatagacatgctaatttatccacactactcacactattagtatgaatgttatgactatccagaaaatagaaacaaatgtcccagtgaatctatgccattacaaagcacgtttaactttgctcctgtcatattttagaaaatataaaacctaaattgcctaatcgtcgtacacagtgttccagaagttgcatggctaaagcaactatagttcaaagtttttgtataggagtaagaaaggtcctcacgttaaaaagtgtattcattgtagcagactgcattctagccacatttatctccactgaatttctcactttaagccagaaaaatgaggctgatgaacgtgatcaaggtcgtaggtatcatttcttttcctctcttttatttctatacatttgtaacttttatcgagtgaatatatgctcatgtttaaaaatcaaaggtgcagacaaccttctaataaaaacagcttggcaggtcagggaattcatcagcacttttctgttttctctccagcctcacttctgccttccaagtcctcacatttctgtttttgcttttatattgtccaagctgaataacatatatatttggttacataatcataattaacatcctctgttcagttttaacagtgttactctaaagttgaaaatcacataagtgcttccattatcgtgaacacagtgggatgtgcaaagaaaatgaaacggcttgttctttgtgactggtgtgatattaatgatgagccccgaccctcctatgtgcctgggagaacattgccttgatcaccaatcctatgtcgtcatgtcctgggcccccaagaccacctcccccctccagattcagtgattcaccaggagagcctgcaggacttgctgtcctgtcacacacatagctaagattcactacaacaaaaggatatgaagcgaggggaaaaggcccagggggaggagtttagaggaaaccgcaggcaaggctctgagtcctcccccagtggtcactcgagaggcactcagttgtgacaacgcgtgtgaagtgttgtctgccaggaagctcaatggagagtcagtgcccagcgattttagtgggaactggtcatgcagacacctctgcctggggcttatcaaaattccagccttgccgagggtgagaagatgttgtgcatagccatggtttgtgcagacagttcaggctctgcacaccacccgtagcagtaagggaatgatgtggacgcttccaaaattcacattcccagatgccagccaagggccaagcttgaaagcaggcttttcaaaccatcgcagcttcagtcctgctagaactcttctgcaaatttacctccatattaagcggtggcctttggattaatgatcggtggatcccagatgcagctccttttgaagtctggggtaaagagcctccgtcaaaaggctcagtctctttcaggtacggctcaggcctggagaactgctctgcgtccccgacttttctctagaatagtgcgtgtgtgcatgcatgagtgtgtgagtgtatgtagtatgtgtatgcctgtgtgctgtgtggtattgtgtgtgtgtgcgtgtgtgcgtggtgtgtttatgcatgtgtggtgtgtcttggtgtgcatgtatgtgtttggatgtatgtgtgtggggtgtgttaggcgtgtggggtgtgagggatacatgtgcacatgtacatatgtggtgtgtttatgcatgtgtggtgtgttttggtgtgcgtgcgtgtgtggtgtgtcttggtgtgcgtgcatgcatgtgggtatatgtgtgtggggtgtgtgaggtgtgtgggatgtgtgtgcacgtgtatgtatgtggtgtgtttatgcatgtgtggtgtgtggcatgctgtgtgcgtgcatgcctgtgtgcgtgcatgcctgagtgtgtgtggtatgtgcatgtatatgtgagtgtgtggcatgcatgtgtgtgtgcacacatgtaatggtaaaggagggagggagggagcactcctgcagactggcaggggtggctgtgaacccctgcccacctcccacggcattttcctcagcatctgctacaaagtgccagggcggctctacactggttcctgaagcagagatgggccttgtgatgaccgatttagctcctacaacttaaacactagctgggtccaaacgtcgtcggtagtaaaatcaccacagcctctgcccctgagtcctaaccttctgccttgcactgggcagtggcctcataccacgtctcctggaagctctgtcaatcccctccagcccttgatgccaccctccctcctcctcctttctgtgtcacagctggggagacaacccacctcttactccgcccctcccgtggccacctcactgctccacccacggtgaggaggtccaggctgccacctggggctttcctcaggcatctgatcatttcctgaaccctgagccctcacagacatacaagccaactttccaacttgcatctccccaagccactttttcccattctcccatttaattgataattaggtcaggcacagaattttaggttgaaattgaaggtattgctgcaagttaaacattctattttgatttttgtttccaagtagatggtctgaactttctgtttagaagatttgaggatctggaaatttgctgctcctgatcccctgtgccctctcccctatctgccttttgcttttgattttttgtttctttatttgtttgttttttgagatggagtcttgctatgtcacccagactggagtgcagtggcacaatctcggctcactgccacctctgcctcctgcattcaagcgattctcctaccttggcctcctgagtagttgtgattacaggcgcgtgccaccacacccagctaatttttgtatttttagtacagacagggtttcgccatgttagtcagactggtcttgaactcctgacctcaggtgatccgcccccttcaacctcccaaagtgctgggattataggaatgagccaccgtgcacagcccgatttcttaaaatttagtcaaaaagttatgaaccagttgaatgcttgtgatgctttttactggtttgctttccaagaggaatgcaataattgacactgatatttcattttaaatgatcttctctaatttaaaagaagtgttgcttttattgaatttttatttctttgatgcctagggaagcttgctgcgcaccccctcgatgccaggccctcctctaggtgctgggatgcctcagggaacagagcagaccaagttggcttttgtgtagctgtggtgactagggacagacagcccttgctctgtgctgggccactgcatggtggggttgggtggggatggtagtaataattattatgaagcaaaggaagcctgaaagggcagacacagaagtggagcaaagtcagggatggcctttctagtaaggtgcatttaacctcagccgtagggggaggctataagtggaaaacgaacaggtttggagcaaaatgtcaaatatcgtctttgtatgttgatgaacatagttttgacctagcacatcccttgaaagggtcacggggacccccagagtctgcagaccacactttgaaaatcattggactacacactaatttcactattattttataacataagtggaaacatgtcttaaggagtacatttctattataactcatataagcatatattgttgttttttcccaaagggtccatcttgctgggatgatgttttaattccaaaccggatgagtggtgaatgccaatccccacactgccctgggactagtgcagtaagtacctggtcacattcattcctcttattgcaagaaaatgatgacatcttcactgtttgccaggaaattagagacaaaatgtcaactgactgttcttccatctaataatgtttgccaaaagtgttatgatatttaaataggttaattacattcaccaaaattccaacctgtgcccctgcctttcagggtcactttcctagtgacttaatcatttggggggaccgtgtggaaatgtgccaatttaaactcattgcaaagttatatccatagaaggaaaaggagaggtgagaaaaggagagccagtgcagagcctccaaaagaaaaattacagaagcatgagattcaccttctctcctgctccagtgatattttatatttatattccccatcattcaaaattgatttttttttctgctttatctacttctacctttctttagtaattttctgacatagtggactattacaaaatatagtatgggtggccggcgatgtaattgaattaccatcctctgttctttgtaatcctttctctctttgcacatatatgccatatgtttcatagaccgcagatatttcctgaaagaacccctaagctctgaatttatttttaagttaattttgttattatggtcatgcttcacatgtatattgttgtatttttttaacctcaaaactcgctggctccgtcgtaatctaactgtatacatttcctgagttgtaaatactgttatgctgccagcacaaatgtcagccttagttcccaaactgtcagagccagctggcagttaataccttctctcaggaacagagtctgtcaacagcaacaggtacagcgtttgagcgagaatcatgagaggagctttctcttgccaatctgctggctgatcggaaggataccaggatggcagtgggcaacaataaacagtcactctccaccagcctagggctagggactacgaacagatttttattcatccaaatcctgaagaaagataatgacttgtatgtcactcacagatttttgaggtatcacacagtcttgccagtttcctaccaggatgaaattagagtgcgtatttcatagggcagaattcttaagtgtaattacatacgtttacatgtatacaaatgtaatatgtatatattatagcatacataatatgtagatataattgcatctaataatataattatatatacatctatgtttccatatatacatatgtgttatacatatatacatacatagaatcttgcccctataaacttgtaagtacaaaccgatgggtttatgcttacaagtttttagggtcaacattctatgtatgtatatggtatacatatatacaacattatgtgtataatgttagagttatatctataactcaaacctgagtttggggccaatattcactcttcctgtgcggcacagaaagtcctgggtctagaatgttgtttaatgtagtcagtcatgagttgtagtcctgggtactgggctgagagtagcccaaatcctctaggagccctgtactttcaaaggagtcctgaaataattttctcagtgtttcaaggaacataaattaacaatcagaaaaatcacaacatatatgtggaaacaagccatggtgaataagagtgagcagaattcaaaacagtaaagaacatagaaattgaaatcatcaaggatagagtataaggatgcttaatatgtttaaaaaataaaagattaaaaaaacaaaacaaaacgattggaaatatccagtcaaattaaacaagcacacacacacctgaaattctagaattatatataaattataataattgacacaaagtttactaaatgggctgaacagcagataagacataggtaaaaagagaaaatagaacttagatctgaaatttgacctgaaaaaaattatcctaaatgcagccagaacataatagatttaaaaaataaaagagaacttaaaaaacatggaggatagagtttgataatacagtcattcctgtctacggccataccaccctgaacgtgcccgatctcatctaataacacagtcattcctggtatctttgggggatttgttctagggcaacttctgcccactttggataccacagtccacaaataaggggactcataggctgtttgaagccatcacagctgtcacatagagactttaaaatccatgggacaaggaagccttgcccagaagcttccagctgacaccccttgggtccccttgtccagattaggccagttctgtgcacaggacagtctggatttgctccagggtagtgtgggtgacactagaggctgcgttctttgatcatgtgggggcggcagctgccccaccaggatggagaggaaggaaggcttcttcccatcagccctgggggtgacaactcaccctgggttccagggaaggtcagaaagtccatcatcgcccccgaaggcctcacaactctgtggcccttggcatgggtgctctggacatggggttgcatcatgaccgaagcctttctcacaaaggccacgctcctgctcgcctctcaggcaggaacacattgttcctgaacgaggatgcggaggcgcgtgcacagcagccctaagaccatctctgatgtgcactcccgagggtgtacctgcggcggaaagtcccccacgctggctttgctcatgaggcccgttagcctgtgaagttccgggtgacaaatgaagcttcttcacacattacactcaccgggcatctctccagtgtgagcattcgggatgcttaaggcctgagcgtggctgaagaatctcgcatagacggcctctcctgggtgtgaattctccgtgctgagtgagtgggaactttctcagcctggcttccccaacaaatcccttctgcagtgtggactttggaattctgaaggaggcgacagctttggctccaggtttcctcatcttccctgcactgaaaagacctttctttgcataggagatcctggtgccaaatggggggaattttggatgctttcttgtcattgcagcacttgtaggacgtgtgtggttcctcacactcctaacacatatgggacttgcctcgtgaattttctggcagtaaataatggctgctgcttctccaggcctttccgaacaccatgtgtttataggttcagagctgggcctccctgtcttggctggattcgagtccttgctgttcagtaccctggcttctcatcaactccagctgtgtggccacggtgattggggggaggtgggagtggcctcaagtcccagcgagggctcgagttcaaaggtcttcagtgctccgcatggaccacgctcctctgggcctggtaggaagccccttctccaggagagacagccagtcatgtcctcaaaggtcatggtccctgtgccaaggtcattatcttccccgcccttattggaacctcaggcttgggacctcctgggaagcaattcctggaccagtcacttggtcagtctagtcattgtcaacattaaaccctcaaagttagaggtgaacctacattgtctagtataaccattcaagggatagaactgaaatacaaaatgccaaattgagagatgaaaaaaaaagagagggggtgaaatataggaaaatgggacaacttaagtagtgcacacaaaaatggcacaagtaaaacctcatgtaacagaaatgaaaagaaatggaaatgcactaactgaaatgtgaaagacaatgactcttagactgggttaaaggaacagaatctggctttatgcaggttacaaaagacatacctaaaacatgtgagcagaaaaacatcgaaagtaaaagaatggaaagtaataatccaggcaagtattaactcaagaatgctgttgataccattttaattgcacataaaatagattttcaggagagggtggaaacattactaaaaaaggagacatgcgaggttttgaggaaaaatatgttcagcatcccaggaaaaggagacttttgaggttttgaggattagaaaggtttagtaacgcaggaagataaagcagtttaaaatggtatgatcttagtaacacggattcaaaatgtactaaggaaacattgtcagaattaacaaaatatgtggataaatttaacaccatggtgggagagagagtaacacagctctctgtggagttgagggctcctgcagtacaagcttaggaaggacgcgtccgattcgtaccaccagtgagcccacgacatcaggagagagtcactcggcaactggaggatatcaacaactggtcgtgttttaggacattaagaaatttaactatcaatagcaaaaatataactctaaaaatctgttacacgtggacattcaaatcactgagtcaatgttaagatctaaatggaaataagggaacaaacaacaatgaaagggtaccacatagcagatatttggagtgtagctaaatttgtatttgaacagggaattaaggatcataaatacccaaagatattcttatcaaggtaggaaaaggaagcatcatatccaactatattttttcttctgtatttaataaacaccaactaaatgcctgttaagtgaagggactgaaggtttgagcactaaccatgacaatagctagctcaagttaagtgttcagtgtgagctcaactctttcactctctcttaaaaccatttttctggattgcattttcacaatgcagctaaatataaactctgactcctgtattttctaaagtcaaggttttgacagtattttggaccctatatataatttattttatatattttaagtttattaaaattttgaatttctatcacttagacaaaatatccatgtacttagaacttaaaatagcagtgttcctaatatattcttaattaattaatatttatacccttaaagataatcttagtagatagttttaaatagcagtaaagtttacccttggtttttaagagtacaaatacaaacttgaccctaactctcctttagacagagaaacctgaacctaattcagctttatgctaatcgctgttattttaggagggagcatactattagttcttacctttttataaaaagaattccggtcagctcaaaggatatatgcttgagattaaaaaggggatgaaatcaattaggattttctccgttagtgaaattaactcaactttggatatggcataagactttagttattctgtgtcgatcttcattttataatttacctatgataccttaaaccaagcttgttcaacccacggcaccgtatgcagcccaggatagctttgaatgtggcccaacacaaatttgtaaactctcttatgagattttttttttttttttagttcatcagctatttttggtgctagtgtattatatgtgtggcccaagacaattattcttcttcctatgtggcccagggaagccaaaagattggacacactggccttaaaaacttaaaacaataatttgtgtttgtatgtgtactgggggatgtgtgtttctcttacttgggcacacataggctaaggaaaaccctgaagtcctagtgcctgagcattatttctgagttccgaatcctaactcgtaacactgaggtccactgtcatccaacgctcccctccgagacctgtggtttcagtggtgcttttctggtaatgaggtgccccttagccaactgcaagaaccttgcctgttccctcacacctgacagtcacacagtagggtttaggatgggggtatttactcaaataaaaaagaaagaaaatttaagtgatctctttaaagtaataaatgaccaaggtcattttaaagaaattcttattgaggggtgttgatttcctattacacaagctataatattttttatatatcatctatttttgagaggcagaatttacctgaagtgttatgtaaaataacattttcttttttagattatttgattttgactggagttcaactcttatacatcaaacattttttttcttatcagaacaagtagcgtaacacctcttacaataactccaagatttatttcaaatgaaattagatacttaaaactatcccctgaactataataaataatgtaactattaaactcagtataataaatagagtgttttcatcttactcaacatgcaatctatttttcacactttccccctcttaggctcagtatatgccaactggaacgttagtttgaatgaaagttaatattcatggtctgcacctctgatttcatgttgttgagagatgttgactgaaacaaaattaatagcaaataagtctcctaatactgagcaattgtgatttatgtcagaagtcatttccgtattttatgtccaaaaagtttcttaataatgttttagtttgatcaaattactatcctccaaggaatctgtatttcttttgtctgtttttattgttgttttagacttcattagaatcacagaaaatgagactcagaatttctcaggatggtttcatgtgtgaactgtatgttttgggtttttttttttctggtgtctaataacaataaaaggttggtttgcttttgtttttaagaaatgctcttggattgaaaagtgtccctgagatagtcacaaatgacggtcttcatttgcacagcatgagagccgtgggctccatattcttgtgttgcccatgctcgtctgcactgtacaataactatcagcacaagcatctccaaatatatatttaagcaattccagcctttgtggctttgaggggtcccactgtggtcaaagagcagctggacacttaaatgtagagagtggaaaatgaaaacagaggtaaaggacaaatggactcattcactccccttttccttctgccctggtgtttggctgaagagaaatgctctgcctgcccttacgttggtccccacagtcatgttttcttaattctaaacaaaattgaattgtgaaaactttgaagtcaaactcagattatgattgaatggtgtctaagcgtgacaaagtgttctctgttgtctgacatgcaatttggggtgacaaactagaaagttttcttagaacatttttcaaaaacccaatccagcattcagactcaaggacagcttatttctaaaccaagttttgaatacttgataacaaaaaatttcttgtttttttttttaattgttaaggttaaaattagaagatagatttttattacagaattagcttaaattttgcaaatttgaatcaaaatttcgtttgtatatgaaaacgcattagtttcccatggaaaaaagtgtcaatgatggtatgaaccctaagcttaatttaattctcctttttctgtgagataaccatgacataacttctttttcatcagggctcttttataacctggtggaaaattgaattaacagccatcttcttcatggtagtgttaaagattccttgtaaactgctacatgaaaaaataatctccagaggaagaaaaccaggtgccagaaccagtgcggctgtagcagagaatctgcacgtgtgaaataacagtgttcacactgctatcacagaacatgaccttggtttagtctatgacgccatctttccagcaatatgcagcttccaaaatacatacttcttgcttccctgttctaggaaactcctagtcaaggtgaatgtcagctgttttttacacttgatgatctgcgatcttctgttctatagtttgtatcgcactttatgtgcagtagaacaaaatcatgcatattactacaacatattcaaatatgaggaattttataccggtttataaaccccagaggcttcaaaagtcttacttcgttttttgcctttccatagaatgattcaaaagccaaacgtgtcagtccgaggctgtgttgatggttgcattgcaggtttagacaaaggccctgaaaacaaagaaacaacaaagcactttatcacaattactcagaaagaggtgtgcttctagaccactaggttttagattaggagagagtacatatcgatctactggaaaagatagtaatagatacaaaaaagataatttcaaatagatttataaatgagattctgagaactagagcaaagaaagattaaataccgctgtaagctttcccaaatgtttcaatcgagatggtacattagacccaaatggaaatatcaaggattagagatgggaggtcactctgagatagcctcagtgcagatacacaggagcctaatggagtgagaagaatagaaggaagacgtgagagtaatgggccaagagattgaggcctgcttctcggccgggaaacagccctcctagtccttccagcaggtgattgatggctcccagggacccgcacttcatcatgccttgatggcggtcattaaggagctatcatctgtcttactcaggtcaagctagctctcaaaaagttatcaagagccacagtaaaatttagtttttaagatatatgtggcaaaaatcccttaaagccagtttaccaaacttgagatttagaatggaaattataagcatatggagaatcaaatcacaactgagacgatgtcacgtactgttgacccacatgtggtgaaacactcccttccactaatgtttcttggagaaaggaacatagtttgggatcttcggatcatctgagcttcctcaagtaggcagtcatcattccccttaatactcagggtttgggaaaataacttcagtggtgatcatcttacgcaagtattatttacaaggtacagagaaaatgtttatgtttcaagagtggaaaagcaaaagatcgtttttaaaatttgcatctttccattgaaagaaatgtagataacttttataacacattgatttgttgtgctagtcactatgcagaaaacaaagactgactttcaggatgtaggaatctagccgagtagagaagacttcacaaaaatggctgcaattcagattccgcagagcaagtaaaaagcttaccaagcatctcttctgtgccaagcactaagatagaaaaacgagtattgaattcactgctttcatagtttgggaaaaattggggatggagtgagacgtgtaggcaaacgatgatttttatgccatgacctaaatgctaataagattggatgtgaaggaccatgcaaggacttccctctgtgaatagggcagaggaaataacacaagttagtatatcatgagtgatgtgaaacacgcatagaaagtgcttatggagttcagaaaacacaaaggtgatcaaagaggacttcatggaggtgaggcccaagggaagagtggtgggattttcacaggtggtgatgttggcatggttgggaacattttgtgaggtacaggaaatgacaggaataaaggaatagaaaattaaggttcatgcattccgtaatcctactggccacttgctctgtgccagactgcccactcagctccagtgtataaaatcaacattccctgctttgatggagctctatccagtcctcatgactttgaacttgtcaagaaggaagatgagatagaaaagcagaggatgttaagaggacatgaaacagggcggctgcctggaatctacgctgggaaattagacgttgagctgaaatgcagaggctgagctagacttgatgactaggggttgaggacatgcctagcagggaggagctcctgcaggagccccgtggcagcagggaactgctctgggaagcacctgggaggtggtgatggctgagaaacaggaggtggtgcattacttccttttcgtttgttcgttcctgtagaagttcattagcgtaataggcgtaatctcagcatgttgaagtttaggtgtttcaaaggctgagacagcagttgcgaagtctgtagtatggttgtggtggagtgatggcataaggaacaaaaagagtaaaagagaatcttgaagggaacaaaaacaaaagattattttgtacaattttttctgccttccttgaatccctggcaaagtgtgaataaaggtaaattagaattggcatttttgtcttccctaaaactcagaacacaacatacaaatgagatgttcgtttagaactgggtagaagtgccactcttttcttgtatttattgggttattaagatcagccatctggtggtcttctgtcttgactgttcgtgtttctccagggtgttcctcagtgggaatctgcttagtggttgactgaaattctatctttatcagcaactctgttatctataatcgctagaaatggatgatccagtatgaagattttcctgcctttctcttcctgctgcttccttcttgtcaatcttcctagaaaactgaggacccttttctgttgccgttaccttttcaaaatattagaggggagacaaaatgggttactatgtaaagtgaactttgagactatctgagacttcatcctttccaaaggacaattgagtcaatagcaactacatgctggacagtttgagaaactggattgagagtttgggattctgtctgtaactccttctccttctatgtccatggccattggcctctgttcatctccatttgtccatttgtgaagcaagactgcacatcagtgaattttgaaatttcactgatcatttatgcagacacaggattcaatgaagcttccttggctttcaaaactgaaggatgttctgttgggtttatctaactgtgtatatatggagatttttcttattcaaaaaccttattcaaaaacatctatatttttctggatcccagcattgtgattttttcctcagggttattgatatggtttggctatatccccacccaaatctcagcttgaattgtgtctcccaaaattcccatgtgttgctggagggacccagaaggaggtcattgaatcatgttggctggtctttcccatgctattctcatgacagtgaataagtctcacgagatctgatgggtttatcaggggtttctgcttttgcttcttcctcatttttctcttgccactgccatgtaagaagtgcttttcacctcccgccatgattatgaggcctccccagtcatgtggaactgtaagtccaatgaagcctctttttcttcctgtttttgggtatgtctttttcagcagcatgcaaatggactaatgtagttatctaacttactaatttcttacctgccttataaaaatgaactattttaacaatcaaagaaccatttctccatgtgcttctaccattttattaaaacttatactgatgttcacaagaattataagtgccattaagtaattttatattaagcaattaaaactcatattacctagcacaatgtacaatatatgaagacactttagagaatcaattctaatttggtatttaatagtgagtagtattaattattataaggcctgcatttaaatgtggatattttattgatagaacaatgaaaatattttaaatgcattcaatgcttaaaagggctatggttcagccaggcacagtggaccatgcctataaccccaccattttgggaggccaaggcagtagtattgtttgagcccaggagtttgagaccagcctaggcaacattatgagaccccatctctatgaaaaataaaaaaaaaaaattagctgggtacatgcctgtaatctcagctatttgggaggctgaggtgggaggattgctttagccccggaggtggagtttgcagtgggctgagattggccactgcactccagcctgggtaacagagcaagactgtgtctcataaataaggactatggttcagtcatgaaccatagtcagtgcatttttctccatttatgtttgcttttatttcaataaaataaatgtttgtttcatttatgttattataattcttgtgaacatcttgtgaatgtattctccatttatatttgcttttatttgaatgaatttatttcattcaaataaaagcaaatataaatggagaagaatgcattgatgcattgtgaggttcattacagctgagtaattatggcctatggctccatgagaactaaatcacaaaactagaaatgtaaactatactgcatgggagtgaagcttgagagccttctcagcaaggccttgtgtttcctcctagggaacatgcaggatcaatagaactgttctaaacaagtggccactctaggataggatatgtcagccacacgtacgggactaaatgcacactgtaactgacagatcccaagaaagcaaataatagaaaggttacccaaaccagaagatacttaggagtctacaaagtcacaattgttacaatttaggggctataatccattaatactggttatcatgcactgtttaaattgtggttccttagaagccatgcaatgatatactgagaactatgggttagtctgatttcaccgcattttcttcccagtgatcacaactggagtacctcctgcaaattctgtcacagatacgacaggtggacctcaaaaaacaaagcaaagctaaactaaaccacagtaacaacctaaaccctttgaaatggtgagaaccaatctctgtttagaaagagagagaggtgggggaatgggtggggcctggaggcatttggagctttaagaggagctgaagaaatggaatgtctttactctctccatcaaatagtgctttgtggctaaagacatgttgaagagaatggccaccaagtggtaagaattgccatgagtccaaatgtttacaggttcaggaactaaattttagcaactcagttcttaaagagacgaactcatgagctatctaatacacagtagactatgaaccatgatgttcatttattggtttatactctgggaacagctccaattccatggtattcatttttattttttatttttttgagacagagtctcactctgtcacctaggctggagggcagtggtgcgatctcagctggtcgcaacccctgcctcctaggttcaagtgattctcctgcctcagcctcccgagtagctgggactacaggcgcataccatcatgctgggttaatttttgtatttttagtagagatgggatttcaccatgttggccaggctggtcttgaactcctgacctcaggtgatctacccacctcggcttcccaacgttccatggtattcatatcttccctctcagctgcatgactttccctcctgccctccactctgtccctgtctgattcttgttgtttttcttcctcactactgttctccttgggcagctccccactaacttgacctccctcaatgttaccaagctattcatccttgcgtggttctttaaaaatatgtctgcaggttcataaatacatcaaaaatgtggttctaggccaggcatggtggctcacccctgtaatcccagcactttgagaggccgaggtgggtggcacctgaggtcaggagttcaagaccagcctggccaacatggtgaaaccccgtctctacaaaaaaatacaaaaaaaaaaaaaaaaaaatagccgggcatggtggtgggcgcctgtatatcccagttacttgggagtctgaggcacaagaatcgcttgaacctgagaggcagaggtggcagtgagccaagaccgtgccattgcactccagcctggacaacaagaaagaaactccatttcaaaaaaaaaaaaaaaagtggttctaatttccctccccacagacctaggtcagacttagtgacttgtttctaagaacagaaaacagtagaacttatgctgttacttctgaagctaaatcataaaaggcaaagtagcatctaacttcctcttttgttgacctgtacactagcagcccccaaacaacattgtaaatgcccaggtttcctaccgcttctgtgctggagagaccagagggaaaggcacatggaaatggagagagatggctaaggaacccaggtgtaccagctcccagcagtttgagtctttgcatcgacaaccatcgtgtttgagaacaagtgagctttcagacaattccacctcccagcttttaaacctcctcagctgttgtcaagcagagcagaggcaagcagtgcccaccaaatgctgctttaatttaatcctgtttaaatttaccagtaaaattaatttttaagaactaaaaaatatttaatccactaacatttggggtggtttgttgaatagcagtagatgacgggcataccttccacagtgttctctgtgatcatgctgttatacagaagactatacacactttgatatatacatctgtctgtctgtctgtttgtgtgcatatgtgtgtgtacgtcatagttttattgaaagggggctcaaattagcaacagacaatgataattgtttagtctgtgttgctataaaggaatacctaaggttgagtacttactttataaggaaaagaggcttatctagttcacagtcctgcaggcagtacaagaagcatggcgctggcatctgcttctgggggagggcctgaggccgctgccactcatggtggaaggtgaagaggagtcttctgggcagaggtcccatggggaaaggggaaacaagagagagagaaggaggtgccaggctcctttcaacaaccagttctcaggagaaccaacaatgagaagtcattcactcccttgagaatggcactaagccattcatgagggagctgccctcaggatccaaacacgtcccaccagaccccacctccaacaatggggatctaattcaacagaagacttggtggggccgaatgaaccatatccaaaccatagcaatgatcaaagcatccgaagtagagttatgtgatcttgaaagagagttcattcaggcagggctagaattatttctatatttaaagtatatctttgcattgaatggtgtcagacaaacagtagcaagcacttttttttttttttgtgagatggagtctcgctctgtcgcccaggctggagtgcagtggcgcgatctctgctcactgcaagctgcgcctcctgggttcacgccattctcctgcctcagcctccagagtcgctgggactacaggcgtccgccaccacgcctggctcattttttgtatttttttagtagagacggggtttcacactgttagccaggatggtctcgatctcctgacctcatgatccacccgcctcagcctcccaaagtgttgggattacaggcgtgaaccaccgcgcccggccagcaaggactttcaagtcaactccacctcttgctggttactaattgcacaacttggtcatgcccaaggcattgaaatgaagttatatatctatcaaatgtgatcctatcatgtctacctgaggttataccctggtctcttaggtttctaagtacatatttttcaagtcaacatcagtgacatatttacaaatgattttatctgatggtttatttttctgtagttttcctctaaaagagacgaagcttagtatgtagcctagtagacaatagctcagacagtagagaaacttgatttgaacttttgttatgatacttacaggctggtggccccagatgaaacctttgcaaccctaggagcttccatattttgatacagatgtataggtgactattatacacagctgttttaagcattatctgataaagggtataaagtgcttacttcagagcctgtcattgtaagggatcaataaattgtagttattatgaccatagttgttataatgtgttgacttttactaggtttgatttcagaaggtggcattctccagccttttccacaaagactacaatcaatttgccataattcctacacagtcaattgccgtttctacaaataacatgtattcaaattaagtggctctgacaataactttgtaccaaactgtaacatttgtaattttcttaaataaaaatgtacttaatttgcattttatataacagattattatgacatagataataatctataccagttgatctggaggaaaaaataacatggtcataatggcttaggaaaagttttattattggtttctattttttttttcagaactgtgtgccagtatgattattaccagaataccacacatttttaaatgtcatactagatgtgtaatttaaaactattatacctcattttcattgaattattttcataataaatgttgcattttctgattataaaaacataatgttggctgaaaaaaaaattagccaacgtactttcacctaaagaggagggtaaggccggatgtagtggctcatgcctgtaatcccagcactttgggaggctgaggcgggtggatcacgaggtcaagagattgagaccatcctggccaacatggtgaaaccctgtctctactaaaaatacaaaagctagctgggtgtggtggcgtgtgcctgtagtcccagctactcaggaggctgaggcaggagaattgcttgaacccaggaggcaggggttgcagtgagccgagatcacgccactgcactccagcctggtgacagagcaagactccgtctcaaaaccaaaaaaaaaaaaaaagcagagggtaaaacctcttgaatcaaaccgcctggagataatcactattaacactgggtgcatattcttccaagtctgttttccatgtgcgtgtgtgtgtgtgtacacatgaaaacacacggacacatacacatacacctgtttttgtgtctcacgtattattttataacttgcatcttttacttcatataatgtgctcattatccatatcaagagatacaggtctctatgagcacatttggtgatgcatcccatttattttgttgaagagtcttgcattgataagtttataggctgctctacatttcattataaaaacagcacattagtgatcttccttagacacatctctagtaatttgtctagtcacatttttgaaatataattttgggagtagagttgcaaagggcaaaatattttacatgtaatgtgttagagtccttagttccaaaaggtaccctggaaagtttccatcaatttccactttcccccaaactacatgtcagtatggttactttgcatcctctaacactgggtgcttttattctttttaatttttccaattatttaggtgaaacatgacatctcatgtaaaattgcctttctccaattactaggaagcttgaatacattttcattatttattgcttactattatggttattttcttttattataattgcacggtatagataaaagtttcttacagtaagtataagaaattatttcttatagtttgtttcttatgaccatttcatatattcttgtatgaaaccatttcttgtcatacatgttgaaaatatgtttaccagtaagtaatttaattttcaggtctttttaaggcgtttcaaaattatttcagatggccaggcgtggtggctcacgcctgtaatcccagcactttgggaggcccaggcagggggatcactggaggtcagaagctccagagaagtcaggccaacatggtgaaaccctgtctctactaaaaatacaaaaaattagccgagcgtggtggcaggtgcctgtaatcccagctactcgggagggtgaggcaggagaatcgcttgaacctgggaggcagaggttgcagtgagccgagatcctgccgttgcactccaccctgggcaacaagagtgaaactctatctcaaaacaaaattatttaaactataattttgatgtaattattgttttctttctttattttgttttgttttgttttgagacggggtctcgctctgttgcccaggctggagtgcagtggcgtgatctcggctcactgcaagctccgcctcccgggttcacgccattctcctgccgcagcctcccgagtagctgggactacaggcgcccgccaccacgcccggctaattttttgtatatttagtagagacggggtttcactgtgttagccaggatcgtctctatctcctgacctcgtgatccgcccgcctcggcctcccaaagtgctgggattacaggcgtgagccaccgcgcccggccgtattgttttctttatggcgttatgtctttgttatcattattaggaggatcttctctacacttggagatatttaatgaaaatcttttctagttacagtttcactttttaaaacatttaaatatttgattcatacagattttattttagtgtgaagggtttctatgaatctaatgttacttatttctcaccaaaaatctacaaattactttttatgcatcatttattgaataaaacatgtttccccattgacttgaaataaatctcatctttttattatattaaccttgagggtcttatctctcgagtctgttctattccattcctctgctcattctgccctgaaaactgtattattttgatccctctaacatttaatacattgtaacatatttaatatctgctatagtaaattctccaaattgctgtcacattttcttttactagtcacacagattaatttttctacatgatctataattttttatgaagtttgaaaataaatcagatggacttatttttaacacctaagttaagcatatcatcctggagaaatatggacgagagagaatgtactttaaacacagatcatataatggcaagttatatctcattttttagtttctgagaaaacctagcacccccaaaattaattctttagttgatacagtttggatatttgtcccctttaagtcttttgttgaaatttaatccccagtgttggaggtggggcctggtgggagatgttcgagtcatggggacagaccctttgtgaatggcttggtgcctcctcaaggtaatgagtgaattctcacttgatgagttcttgcaagaactgattgttaaaaagagcctagcctctctctatatatatatatatctctctctggcctgggcccctttcctctctttctctctgtctgtctttctcttcctgccatgtggtctctatatgtagactccccttcaccttccatcatgagtggaagcttcctgaggctcttaagagaagcaggtgctggtgacatgcttcttgtacagccttcagaaccgtgagcgaactaaacctcttttcttttaaattacccagcctcggatatgcctttatagcaatgcaaaaggactaagacattaacattttgttacctccatatgtaagctctcggctgttattcctcatggaccagcaatttgaagctatgaaatcataattccgtgataaaaggttaacattccatatgggctatatttttcctgactgaaaaagttagagtcttggataaagttaactgagaagaatctgttctctgaattacatgtatccagtaggtttcaattggaatgaagtatgttgagtcattagggtttttaaaattattatttctatttgatttataaggctacttggaaaagtgtgttaacaaaatcagtaccaaagtgttcttcatcataaggaattcttctaagcctaatatctcctgttcacctttcaagttttgtgtaatttttataagtgaaactttatgcaaaaacagataggaaggaaatgaataaactgcaggaaatatgcttgtttctacttgtctctacctattgtggatcaatttatgaagacagcacagtatagccttaaaggcattggagcaagaaacacccagtttctagctgttttaccagcactactttttgagtgaccttgaaaacagtttctgcacttttaacatagggaataataatagcatcttccataagggttgttttcagcaagctctgaggtgctaaatatataaagtaactaatatagtacctgacatgtagtagacactctctctctctctctctctctctctctctctctatatatatatatatatatgtatgtgtacacacacacacacacacaattgaatgaccctgtgagcgaggccaattttgtgtatagcttttaaaaatgcatatttgctgctcccctttatttttcataactttcaaacattatgatactgtattcccaaagatcgtttatactacattatctgaattgatttaattaggaccagttacatcaaagggcagcttccatgttataatatttcatagggctatgtcagaattcaaagagagacctttcttatactttgcatattgattcatgcattctacaaatatttgttttcaaggcataattctaaattctggagattaataaataaacaagatagaaaagatggaaggaaaacacacaatgaacagttaaatgagtgaacagcataatttcatctgttgataactcacacagttttccaaatgtctgaaaattagctttatgataaaaaacgatttctaagatgaaagctaattaattaaaaaatcatgctttaactacaagagaacctctgggaatgattagaactcaggaacctggctttccattctacctctttaaagagatattgaccaaattcccctacgaaatgatattttggggctagatgatctttaaaattcctttaaacattaaatatcattgatctatattatttttaaagaaaaaaagaagcatattagttataactaaggcacatatatataaagtatgcattgtgaattacagagcataaattatgatagttgaccaatggtgtgcattccttatagtacatatgtagcacatttaagggtttaacacatttagcaaataaaagtataaaagtaaaaaactcctcttccagtttcctgttcttctatgccaacaagtttttaagactgaaggtatcaatgaatgtcttccataaaaagagatgtttcagaagggtgaaagccagtcatatttctgtaatgtaaacacattgtcctagaccctgatacactcgaatatgatccatggtcagcacttgtaaagagctgtgaaaagtgatggaggcgagatcattcataacatgtgagacagctgagagaggagccagtgtctggaataaaagaggcagaaagattgggcaagaattctctaaaccaagaataaaacaagagtgtcaggttaggggaaagccaggatctcagagaaattgggtcaagcttcttggatattacagtcccaatcaggagtgtggtaagacatcttggaaagcacttcaaacatgcagctttctttgttttgtcatatttatctctcgttggattgcatgtgggagcattgggttcatttcaatggaagagtgatgaggataccactgtaagtgtggtttctcattctgccacacatcagagatgagtcattgtctcatggggctttctgtaactttcaagatcttctagccatgctttctctgaaaaaggagccaagagcagtgaccgttagctatactgcagaaccttggcattttactttaacctctctcagcttcgcttttttcatcgatatgaagcgataatcatgcagtattttcaaggagaaggaatgaggttatatacgtaagataaccagcagatagtagctagtaaacatgaaattattttgtcctctctagaggtggttgacagacaaactggcctaggctgcaaagtggcccccactttgcctcaagattcagacatgttttctgttgtctcctgattttaaaatgttctctccttcactcccatctctgccttagaattccttttctacagaacaaaataggtatggtttttagagaaaagtatatgactaggtaatcttatgatcatatttgccttgtttttgcttggtggttttaaaatattattattttcattgttaaaaataaaattctccaaagagtggtatgacagcagcagaaatacatttatgcaagatggctgatggatattgtaaggggagatgaatatgcttcttaaatataaacatttaaattaacccttaagaaactctgcgctgcttgtgctgtcggctaaagctgtttgaaaaccttgcagcattagtagcaagctgttatgagccagataatattgatgacacagttatgttttatccatgagtacaaaggcaaccagagggtgtaaacaattttgaatttggaattacagctgaaataactagaacattacttcacatgtagttagtagaacaagctttcagctaactgggttctgaattatcttgacatggtatttctttctgttgcctgacttcatatatcctcaggacatgcaacgatccacaaaaaagtgactcttagttgggcaccatggctcacaactctaatcccagcactttgggaggttgagtggggtggatcacctgaggtcaggagttcgagaccagcctagccaacatggtgagaccttgtgtctactaaaaatacaaaattagttgggcatggtggcacgtgcctggaatcccagctactcaggaggcaagaagaatcgcttgaaccttggaggtggaggttacagtgagctgagattgcatgattgtacagcagcctggacaacaagagtgaaatgctatctcaaaaaaaaaaaaaagaaaaagaaaagaaaaagaaaagtgactcttttggcagccttttgaatataatcttacttttgcatcataatatttgtaaataagctttgactataaatgctgctcttgcctatgagagataaaaaaaaggattagatgttgagagggatgtggaggatggggctcaaccaataatgatcgagtaccttccatacccacagcagcagatggacactctgggcaattatttcaaacatgcagtctaatttgaatgataacatatattcttgtcaccatttgttatcattaaaaaaaaaaaataggtgcccttggaaaggtgtgtgcagaaagaagccaaaggctttctcaccattcctagatcactctagaattgtccttctcaggccttggaggacatccgagctggacatctcagctgcattgtttattttccattatcaaaatgtcaagttggccaacatcaaagtgttacttatgtaatgtcaacttcttcctctctcaccactcagtcttatcttagaggaggaaatgcgctatagtttctttttaatttctttgttctctcattcttccttccccatttactcctttcgtggctcctccagaattagggtggaggggctggagtgagctgaggagaggtaatgatcaggaacagtattcatagactgcactcttgaagaatctgctcttgatagagatgtttcgttaattctccaggagggtgtccatcacctgtacatccacaaattccagtacctagagctctctctctgcggtcctcttaaagcaccttgctcccttgtcttcagggtgtgagcccagggtctcaggtctctcatttcattctctgtaactgcctaggaacaatgattctcagactcagagcctctgcccaaattctgagacagcagaaaaagttgcacttagaacagggagtgtgcagggaagggttttggcaagtgctggaaaggccttaaaccatgaaggttggaggaaggcttgtaactgtacaagggtaaaaagaaggcttgattccaggaaaggaaggggcttcctgcaaaggtgcaaagatgcaaatcactgtgacatgttacagtgacattaagaagaccagccagatgagagcatgaggcagccatgactaatgacagtttctgagatctttccagtaactggggccgttttacattcagagtacctctaattcccagcagtgatttcatcagtggagatgggcagataacggggagctgcagtaacatgggaggcaacatcatttgtcaaggagtgggaagaaagtggcattattagttgtagggatgtattaaaagtttcagccagctgtctgggaaatttggggggttctgagaaaaacatggaacagaaaggtgcagcggctgggcacggtggttctcgcctgtaatctcagcactttcagaggctgaggtgagaagattgcctgaagccaggtgttttagcacagcataggcaacatagagagagcccatctctacgattttttgttttaattagctgggtgtgatagcgtgtacctgtagtaacagctactcaggaggctaaagcagaaggttggcttgagctcaggagtctgagattacagtgagctatgataataccactgcactcccacctgggtgacagagcaagatcctgtcacaaagcatgggactagcatttgctattttcataaattactgagatgtcataattaatgtgtttttatattatggtgtatactaggaaggagttgttaacaccttccaatgataacaacaacaaaaataatgcccaagataatccaggacaattaagcaaatacaaagttatggcgtttagtgggaacaaattggacagggtcaaggttgagaataaaggatgaggcaaaatcccagcagagagggagccaaacctcatgaacaactttgctcagcagagcaaagagcgctggcatggatgaactagagtgcggtgcacggtgccatcgaggaaactgggatgagcaaataggccatttcagcagcacaagtacgcatttcatttccccacacattacctcctgtgggaaatacaaggatgtgaaagccacatcccttaacttcaggaacttgccttactaatgattgagagacataaaatacaaccttgaagaaaggtccttcatggtaaatatttgatgttgcgtatccccaattgatttctgcaaactttaacccaatttttaataaaagtatctgtaagacagaattacctggaaagttttcttttttaaaaaatagaaatgtcagacccagtgactgaatttctctgtatcatgtgtgggggtggaggtgggtgggtttgtttctgcagagctccttgggtgattctgaagtgcagggagaactgggagctactagtaagggcagggcaaataactggcctgccacaggagttctgattgtatttgggcacaaatacagtcactttaatggttgatgctaaacttccaatgacatatgtttgttccacctgaatttctggtacattccatcctatcattctaaacatcaccacagtaataatttatgggactctccaaagagctcaggaaatgtgcgttcacagcaccctcttctctttggtttccacatggcttgtgccatgtttcattcctgagctctcctcctgggcgatgtccactgtttgctgtcaccctgaagccagtcaaacgccaccctcttggctttgctacgggtcccccatgtgaaaacaccaatatccacttccaggttagtagctcccaatattcccaagccaatgcctgtgggtgcccagacatgctgggctctgtgtggctttggacagcgtccttccctccattcactgctccattttgtagccagctccctaaagcaataatgcttgtgcccgtagctcctcagagtctctcaaaggaagcagcttcttccatctcttgcctactgcttatttcctaaagaaagatttccgtgcccggaagtttccacgcacacctccacaggagcacacagcagccggcccagggctccgtcatcaatggagatagaaccagcaaagatgcacctgcagcttgtcttcccctgcctcgccccaaacctctccgtttcagagcacagactttgctttcactttgtgttaactaaaatgtccatttagatggttcactgaaaacattgacatacttgttccaaaggggaatttaagcctccacattatagaagatagaaaactgatggcaatgtttaaatggcagctgttctagcttctacctatcaggttaaaaacacgcacacactttaaaaccatgttttagataaaatacgtcaataaacaaccaagtttttataacacctggcttttctaaaagagcacagttgaagctgtacagaattctcctggaaagcctaatgacatgacagttctcagtgtttctgaccatctttctttctgttctttggaatctgggtcagaggcagtattcggagtatatttcttatgtgatttttttttatcctggcaatatgggaaattatggaaaaatcaaaacatctagtatgaatataaaccacactccaagttaatgtaattaatctattcctccttccccaccttccttcttccctccctctctccttttctgccccttcttcctcctctccactttctccctactttccacaaccatgtattaagcacggaggcaacctcagcaactgtgctaagatctgtgaatatagaaataagcatgccccttcccaccccccagcaagtatttattgtcttatgagaaaggcagatgtattaaaacattgcagagtataatcacttacagtgttatatggcatatctggaaacacaaatttgggcgtggttaacttcacctggcatagtcaggaaggattaacagatgaagtgacatgagcttgctcttgaagaaattgctgatatttctttagttttgtaacaggataaaggtattgcttacttattctacttttgcctgaggactggtttttctacacaagaatatacagaggtttgtcgcactcgcaggaactgaaaataagtggaaatcagagcaattctctgacaggatagatgcccagagggaccacaaacatggttactttatgaggatggtgcaaaacatcaacttagggtgttctgtgattataacattgaaacatgtcaagattaatatcatggttaaacatacagaggaggatatccaaaaacataggaatcataagatgaattcctatgaagtatggagactaaaaatacagtcaatttcttgatatagaaagaataatgcttagagtcttgaaacactaacgattgacatgggttttggggagagcagaatttgtagagaggtcataagtgagggttctgaagttagaagcccagatttgaatcccagctctagaccgcagcataccacgtgaccacaggcaaaattgcttatctctcttttttagtttcattatctattaactaggaattcaaagtggtttctagtttataggtttgttatcatgattaaatgagaaaatgcctgaagtacagtccattacacatacggtagactcaataaatattaacttctcaccatcattattttatgaaaagcaagctattaagcaacatgactctggcaacttaatcctgattgccaacaacataccaataatttgctcttcatgtgatctgaaattttccaaggtttgttgaatgtacacagttggagaacgtacaacagcacaattacgtttcaagccattactatttaacttattttgatgaatgccatttgtggggggaaaaaaaagcaaagcagataagtacatattaagatgcctttagggagctccactttccctactaaaagcatttttctaagtaatatagcttcagaacatcttgactgaaatagctttagaatatttacagcaaaagcatctcttttaggaaagttgaggtggctgaaagtgaatgtgtcttaatgcatgaagagcttacaggtccacaagattgcaggacatacgtgttcatgaagccaatgaaaactcagtaggttacaggacctacattctggttctttccaggagagttgacgtagagctggagtggcttcatctgcctctatttacaatgagagattatgagtacataattgcagtgttagcagaaggcatcacacgtgtgcctccgcattttagggaaagccaacttgccttccatttgtcatgtgtctatgaatacgcgaatacatataagagttctctgtcttcacggagttgcggaagtgatagtccacaaagttacacagatgtcaacatatttcaaagcaattcactgaaagaactaagaaatgaagaagctcagatttctggcttccaggctgttgaactattctgcatgtagctatgctgacaagtaatttcatttgacaggacctgcgagcccatgtctgttctgctaagaaaggattgttaacctttccttgactgcaatagtggtttgcaactgcttgtttggccctcatctccctatctaccaagccttgattgctcctgtatttaaaagcacattaaacacaccatggcccgggggcagtgcctcatgtctgtaatctcagcactttgggaggctgaggcgggtggatcacttgaggtcaggagttcaacaccagcctggccaacatggtgaaaccccatctctactaaaaatatgaaaaaaaattagccaggtgtggacatgcctgtggtcccagctactcaggaggctgaggcagaagaatcgcttgaacctgggaggcggaggttgcagtgagctgagatcgtggcactgtactccagcctgggcaacagagtgactccgtctcaaaaaaaaaaaaaaaaaaaaaaaaagcaccatggatatggccactgggagatcacagaattcactgacaaggtttccttaaaaagttgacactgcaagaaagggtagtcaatagaaggaagtcactaaaaagatggaatgaattggacagtatatagggagagacatgacacggattagaaaaggctcactttctgtactgcacaggaaggaagaaaacaaaagtacctttgcagatttgatggtcaaatgagagtatactaatcttctgaaattatttataaataatacataatttaaaaatacagactgggtgcggtggctcacgcctgtaatcccagcactttcggaggccgaggcggtcggatcacaaggtcagaagatcgagaccacggtgaaaccccgtctctactaaaaatacaaaaaattagccaggcgtggtggcaggtgcctgtagtcccagctactcgggaggctgaggcaggagaatggcgtggacccaggaggtggagcttgcagtgagccgagattgcgccactgcactccaggctgggcgacagagcgagactccgtctcaaaaaaaaaaaaaaaaaaatacaatctggacatgaacacaacatagaaacgtatagaagttatatacatatataaaaatatgtaataaatgtttcataatataaaaaaagacttatttggtgcacgtgctgactataaacaacaaaggaatgaaacactggacttatttttgagatgcttacagtttagtctaatttataagactgctttctctttgtttttgcaaatacttcaggtcttcgatgaactcaaaattcattcttaggtgtaaaagttagatctttgtttgggactgcaccaaggtcactagagttcagaactgaagcatctatgtggttttagaagttcctgagtctaaaaattgttcactatagtgacaacaattcgctttacaagagccttacacacaaaaagtaatattcctgggaatacatttaatcaaggagatgaaagatctctttaaggagaactacaaaactctgttttaatttttaacaaaaaagtggtaaatgtaaaaatttaaaatagaaataagtgggctgggcgctgtggctcacgcctataatcccagcactttgagaggccgaggccggtggatcacctgaagtcaggagtttgagaccagcctgaccaacatagcaaaaccctgtctctactaaaaatacaaaaattagctgggcatgttggcacatgcaattacccccagctacctgggggctgaagcaggagaattgcttgaacctgggaggcagaggttgcagtgaaccaagattgtgctattgcactctagcctgggcaacagagtgaaactctgtcaaaaaaaaaaaaaaaaaaaaaaagggttgggggagggagggaggaagggagggactcgtacctgacacaaacaaactggaaaacatcctgtgttcagggatggaagaatcaatatcattaaaatgaccatactgcccaaaacaatctacagattcaatgtcattcctatcaatataccaatgccatttttcacagaactagaaaaagcaattctaaaattgatatggaaccaaaaaagagtccaaatagccaaagaaatcctaagcaaaaagaacaaagccagaggcattacattacatgatttcaaactatactacaaggttatagtaaccaaaacagcatgatgctaatacaggagtactggaaagggaagagtatggtccttctaaatgatagggagggaagggaagtgctgggtaaaggagggcgtggtccctggctacggctccacccccatggacctaggtgaagacaggtagtcctgctttcgggcccaaatgttgcattttctaagaccaccctggtccgccacacccccatcctgggtctctaaaaacccgataccctagcaggcagacacacagacggccagacatggagaggagcacatcggcggaagaagatgcaagccgctagtcgtggagagggcgaggagaggagcaggctaggagaagagcacaccgacaaacaccggcaggcgaccagcagaaccacgtggagtttggctggggcggtcggaggagagccctggccccgaagcagcccgactccagggaaaaaccgtcttccttcttgctgccccatcagctgagagatacttccactcagtaaaactttgcacccattcgccaagccaacgtgtgatctgattcttctggtacaccaaggcaagaaactggggatacagaaagccctctgtccttgtaacaaggtagacgctctaattgagttgattaacacaaggtgcccgtaggcaaactaagagaacaccctgtaacacacgcccactggggctttaggagctgtaaacagtcaccccgagacactgctgtggggtgggagccccacagcctgcccgtctgtatgttcacctagaggttggagcagcagggctctgaagaagcaagccacacccccaccgcatgccctgctagggggacaagggaacctttcccatttcaatactggtacaaaaatggacacatatatcaatggagcagagtagagaacccagaaataaagcctcatacctacaagcaactgacctttggtaagttgataaaaatcaacaatggggaaaatacaccctattgaataattggtgctgggaaactggctaggcatatgcagataagtgaaactggaacgcttcctctcaccgtatgcaaaaattaactcaagatggattaaagacttatgtgtaaggcactgatttattaaaatcctagaagaaaacctaggaaaaactcatctggacactgacctaggtaagtaatttattactaaatcctcaaaagcaaatgcaacaaaaacaaaaattgacaagctaaagagcttctgcacagcaaaagaaacaatcaacagagtaaactgacaacttacagaatgagagaaaatatttgcaaagtatgcattggataaaagactaatatctagaatctataagaaacttaaatcaacaacaacaacaataaagaccggttaaaaggggacaaaggacatgaacagacacttctcaaaagaagacatataggcagccaacaaacatatttaaaaatgttcaacatctaatcatcagagaaatgcaaatgaaaaccacatgagataccagctcataccagtcagaatggctattgtcaaaaaataacatatattggcgcagatgtagagaaaagggagtgcttatacactgttggtgggcgtgtaaattagcacaacctctatggaaaacattatggagatttctcagagaactaaaaatagaactcccattcaaccctgcaatcccagtgctaggtaactacccaaaggaaaagaaatcattctatcaaaaactcatatgtttattgcaacattattcacaatagcaaagtaatgaaatcaacttaaatgcccatcaatggtagattggataaagaaaatgtggtacatatacaccatagaatactatgcagccaaaaaaaaagatcaaaatcctgtcctttgcagcgacgtggatgcagttacaggccataatcctaggggaattaatgcagaaacaaaaaatcaaataattgcatgttctcacttataagtgggaactaaacgatgggtacacatggacataaagacgggtacaatagacactggagaattctaaagtagggagggaaagaagggggcaagggttgaaaaactacctattgggcactatgttcactatttgggtgatggattcaatggtagcccaaaccccaacatcacacgatatacccatgtacaaaactgcacatgtaccacctggatttaaaatttaaaaagaagaaatgcaggatctcaacccatcccagaagtagggaatcaaaatctgcatattagcaggatcatcaggtgatttgtacgcacagtaatatcctagaaacttcggatgagtaatatgtttcttatctgagcatgtggggatattttagtcacggaggaagggacttcaaaatgttcatggaaacgaaattaaaagattattttaaaaaagagcttaaggaaaaaaaaaaaaaaaatatatatatatatatatatatattccctgtaatgccgggacatcaaaaagtatgagaggaacagattctagtcttcataaagcataaagggattggatgaccttgaatttgtactgaccaattatttgaaagcctttgttaaaaagcatcagatttttagtcatttaagtgtggttttatatgatagtttaattatctgttttcttatcaattaagtacattatatatatatttgatgtatatagatgttatatattatatatattatatatataatatatatacacatatattttatatatatatatatatatatatatatatatatatatatatatatatgtttttgttttttttttgagacagagtctcgttctgtcacccaggctggagtgcagtggtatgatctcgactcactgcaacttccacctcccggattcaagcaattctcctgcctcagcctcctgagtagctgggattacaggtgcgcaccaccatgcccggctaatttttgtattttttgtagagatgaggtttcaccatgttggccaggctgatctcgaagtcctgacttcacagtctgcccgccttggcttcccaaagtgctgggattacaggcatgagccaccgcgccgggcccattacatattttaacagaaaattcaaagagagctattcttgtttgtcatggcattcctaaattttaaaatgtagaaatatggggagaatctttattagtcctatatgtgagaaaaaaatcaatttctgaattccactacatattaactgttaactccccaatttcaacatttaagatgttttttgaaatgcttttctcgagttagtagatgctgataagcttgaacttttttgtttacctacatatatatctgtcccttaccaactgctttgaaattgtgaaagaaccaagatatgtatgtttagcctatcagctacatccaacttcatcaaccactttttgatattcaaatgaaaatattttcagtatcatgtacaaaagaatatctagaaaaacattcatatctttaaataggattttgctcttttcagacatcatttgtatgtttctttgtttttatctgttttttttttttttttttttttttttgattcattggtcacttagtcagcattctgtcactgacaattccagttccatccaagctctccctatattctatccatgtttactgcaagtcagaagtgcactgcagtcacagatttgcagggctggagcctaatgagctctctaagcctgaccaagccacaaaaacacagttgttctccgcaggaagagtctgctgtccctccatcctctcaactttgagcacaggttacaaatgcacatgcacttacaggtgctgctgacattagaccaaggctgagcaaaaccactttgtgatattttttttttttcctttgagacggagttttgctcttgtcgcccaggctggagtgcaatgtcacaatcttggctcactgaaatctctgccttccagtttcaagcaattctcctgccccagcctcctgagtagctgggattacaggcgcccgccaccacaccaggctaatttttgtatttttagtagagacagggtttcaccatgttggccaggctggtctcgagctcctgacctcaggtgatccacccaccttggcctcccaaagtgctgggattacaggcgtgaccaccatacccagccatgatttttaatacataaagttatctagcatatgtgcaatcacagattaaaggctcgttgtagtctgttgtgctaacaaagcgtggaccaaggactccccaagtgttctttggcatgccagatcttaaaagctccagaagcactcttcagctgggtcctgtcactgctcagcagattaattacacatcagcgcaataagccataagcgttccaggggaagttattgcagtatatcatttcaatgatctgtagatagcaggctgctgggagacttgttttgaacggtgcctttcaatccatctctgagcttgagggtgcaccgaggcatgccagagttggaaacacttcagtgcccctcaaagtattctttcagctccttagcccatgtcttacatggttctggagattctaatgacactctaacagctatagcacttattatttacttattcaacacacaggcatgcagggcccaatggaaaggtgaatgaggaagatatttagggagagacttggcacttaatgcttaagtcatgaataaccttgttggtctctgtgtacctcatgtttttctccataaaaatgtaaatttgattatagaattttagccctagtgtttcattctgatagtagaaagaaaataccttggtagctcttcctgaaatgttgtatgagtcagtaaaccatctaagtatggttgatcaccaaagttctagaaggaagcatgtgatgctttacataagaagaatttgtgatattttaatgtagtgatataataggcaaagaatgatgtgatattcagctagtgcaccaaggctaaattatgagaaaataataatataaaaacaggtgacttgctaagtgtagtgctctagattttatatttaacttagagtttcagataacataaagtcattacatagtaatctcattattgcagagcccactcatgtaggatttatttaatggtagagagctatactcaagataggttttggctcttgggaggacaaaaaagcatcctaagtatataaatacaattagagattattataaaaagctgagcacactgagaaatcactttgaaatgatcagttcgcacattacaattttctatactaattgtaaatcattcctgttgctgttttaaagcaggtcctaaaacacatctgtcaagattatgagagcttaattcgtattaccataaaagactgaaaataataaaaacatgcttttcttgcaaaatatttgataatttagactccaagtaattcaaaaatggctcctctcatcattagtttttcttattttaaccacatctcccaagaatgggatatgagcacatgtgcatttgttttaaaccagctattgagcctcaagactttgactttgtctgtctaaaagttattatgggccgggcgcggtggctcacgcctgtaatcccagcactttgggaggccgaggcaggtggatcacgaggtcaggagattgagaccatcctggctaacacgatgaaaccccatctctactaaaaacacaaaaaattagccgggcatggcgatgggcgcctgtagtctcagctacttgggaggctgagggaggagaatggcgtgaacccaggaggtggagcttgcagtgagcggagatcatgtcactgcactccagcctgggtgacagagcaagactccgtctcaaaaaaaataaaaataaaaataaaagttattatggcctgtgttcttcatctctgttccagatctttcccgcagggtcatggtgctcattgcacatagacagccagctacctcagcaagacacataggaacaacagaggctctctcggggtttcttttttcatgcttggtattggtttattttaagatgaatgcagcttgtcttatagaaatcaaaaaagaaatagaaacgctaagtgacagaaaaggttaagtatgaaattttgaagcctatatatagtcccttgctgtgacaggcaacgtttcagaagatgatggatgtgattttcccaaggggatcttttactgtaatggagaaaatatctgaattaattagatacaaaagcccatactgttgagcctctgatgagaaaaactatatttgtcgtgaagaatgatcgcatgaaatgttaaaccatggtttttcaaacattcttgaaatatttagttatagttacaatggttaaaattttcagtgttacattgaatgtggtgattttctatcatttagtcagaattagatttttctacaatatttatgacatgaacataatggatatgatttatggggcacttaatattgtcaggcaccatgccacatgccttctatacacatattggatcccatttaaccctcatagtttctatgtggtaagggtcattttcctcattgtaacatgtacatgcatgtaaactaggcctagattagcaaacatttaatgctacataactagcgattcccagacctgaatttcaaaccagttctgatggattcccaagtacagactcttaaccaccctagggagctgactccataagatatatctccctatggaagttctaaaaatagctatttacaacattttcatgaagccacacaaaataatgaaatgagcttcacaaaatgtaaaacacaaaaaattaatccacatgctatgatcttagatatttaagacaaactctttgttaataaggggccatttgagcaggcccgggagagaggcggatgtttgagttgcacacacacagttgactgagtggaagtgtgtgaatttcagagccgcgtgtgtgaggtttcggaaggtggagttggcgtgttgggtaggcatccatcctgcccatcccctcttgttactgcatgatcctgaaagcatcagatgcagaagggactactgtgagatgagcagtgagggctgctttatcgccaggatcctgtgcctaaagctccatgacatctccctggtaaaggcgaggtaggactccatggcatgcttgggcttgagaccgaagacaaccttcaggctctcaccatatataaattgtgatctcagggttgttactattgagtgaccagtggggatgggtcagccacgaggagagtgttccagggtaacttgcatggatctaataccctacttctagttggccctgctagcaatagacatggcccaactaaggaatcaaatgttgtccatcataagaaccttctccctcctcgtgatgggagatgaaagttggcaagggacagtcagaggacctcaggagtcctgtgcactttccacctatcaagacaagaagaaagacaggaggagcattttatcccctttcaaagaggatattttgtccaaggggcagtctgcaggggttccaaggcaagttacattttgtgtatggaaagtgagtgatggaaaaaatgctcagtaattttctaatcggcctgtattttcaagagtctattattaatttgaattaaattcatgtatgtgattcatatgtataattaatgtggcttacagaaaataaattggaacaacaacagatgtgtcgcctttgctatggattcagtttttttttattattattttaaacaagaattagtcccaccttttatttctttggcagaaaattgccctataacataaaactgactttcataaaatatcagcaaatttgaaatgccagatggagaccttcatcttggcagttttgaactgttcttttccattttagagtctcagaatgaatacttatcttgtcagtttatgctctattgtacaaaggttctgtttcgtgtaaatgaacttcagtcaatttacaacaaattgatttccatctctaagaatatcctaccctgcgagtagatactttccatgaatatgtcatttacatttgatttctgacctcagccttatatattgattgtaacatataagcattcatactttcagtcttgaaatttgaaagttctcggcttaccattttctcactgaaggactttcctgtattatgttctttatatctgaataactctttcattcttctagctggaatgctatagagtacattgtaatttgcttcaatttcagagagtagaagggtgagcagtggaaggtgacaggggagaaaggaagggaggagggatgcattgaaaacaggattcagcagcaagagcgtagctgacaatctccagcttacaaatgccattcctgttgaaaattaggctgtggctgaaactggaccttgaacgggagaatattacagccctgaattgagttggttctgcgcttctgcctgaaagctgggattgccatactacttttccctttgcagttacctttgatacatagctctttttttctctagtttctgatcatcatccttagcccatatacttgttactgcaattgagggaaaagaaaccaatcatataatctcaaagaagccttttttctcccagaagaatgaagctcagcggtgtacttgtgtgagttccttttctccactgccacagtttagcgatttgttagcctaacatttcagaactcacagtcaaagaaaccttccccaccacttcactagaggaaacacttgacaataaatttgaacggttggcttccaattttcaaaaggatcaatcgcaaaagttgctgttcttaaaatcatgctgcaagtttactcaagataatatgttttaaatttcatgttttctacaacgtgaacatgttgtctttcaacaatatgatattatacaaaaagtaattgttattgaaaaataccagaaacaacctaggggttgcctaaaccgggagagtacaaccattcaatagagtactatgcagctgggaaaaaggcatgagaaagacctctacacactgaggtggagtaatttaaggactaccttgctgagtgaaaaaaaaaatacgaaaggtgatctgtattgtgttatcttatttgcaggagtgaaggggactgagtggagtggagtaaggagctcccctcagctgggagagagagccaggtgtcagagtagccatttaaagcaacaagcccttaatgagttaaacctttcatcactcactgcagtgtatagggagtggtatagggaggaagcaccagctcgcttccgttcctgtttcctccatggaatggtgcactggtcaagggtcaggtggatccgtgcggacatgcgtgacccaacaaaaggctccagcagttttatggaccctgtggccaggtgaagagagctcaaagtggactgagtcacagtgaggaagcatgtcttcaaggtttcccctcctcctggaaggaggcctctgcagaggcgcctgaagagggccttgcccagggcctcagctagagacctaggtatgtagcagtgtgagtacgtaaaaaagcctgactggccgggggctctgaaaccttgactgtgcagggctctggctgtgctctgaatcccatgtgggagggcagctttgctcaactgcccatgctccgcctgaaatgtcacacgtgggtttttaaccaggccccacactgaaagtatgcatgtctgctgatttttatcaaagaaatgggaagaataaaccagaaacaagtgagataaatttcccgatggggggtgagtaggaactgaatgggaggtacgagggggtagcagtgcccagccagggcccaggttaggacagtgacccttctctgaatctttttgtatagctttgacctttggaaccttgttaatgtattatgtttaaaaaaatcagcaaggacacagaataaaacaaactaaaaccaattataaatgcaaacaaatgaacttaatagtatttcaaatagataatatggcacagtgaaagggaaaaggaaatttccaaataactttacccactgaattatttactacatacttttagcataaagtcagaactcaatataaaaatgaatttaataagtagttttgtttttgttctgagttgtcatttctataactcctgtgtattctaaatttgataaacaacaaatattgagataaccagagtcagatttatcagtgtcacagaaggaagctacagatattgaaaaagaagagtctcgaataaacactgtgatgcttgattggaatcacagttatcactatgcacttggggttgtcataaagatatttttgtgtataacacacacatttcctagcttcgtctttgagaatatctggaagcaatgacatcccactaggaatgaatacacctggcactcagtttctgaacattttctccactaaaaatactagggctcctcatagaaatggttgattctggggttggagccggaaaagtataataggaggctggaacatttttcttacaccagaaaagaaagaaggatgcatgtaacagtgaggacgtatccaaaagacaagggatttagcttcagagggctcccattggctactctaggggaattgagtatcaaaataaataatgatattatgaccaatagatgttaacccagtaaaaaataggaatccatgggtctgtatgatataaccaaataaatacatacataaataaatgttagaagtctcttcctctctgtaaaattccacatgtagaaggattgattcatttagaaaaactgcagtttggcaaccatcatactaataattgattcaagcagggattatcaatggatactaaaactggtaagtagaggtttgattaacagcagaatatttgcatagccttgtcgccccagaaaacacttattcaacataaaaataaaaatcaggaaccttaacagtggagaaacctggcaggaaccacctgaaccaaatgatcaaagctgaaatattgggacaaacgatagcatgtgtctcctaatataaacatcagacaaacccagattgaggaacattctacacaaaaactggcctacactcaacagaaaatgtcaaggctatgagagagagattgagggactgttccagatcagaggggactgaaagtacatgaaaactcaatgcagcaggtggtcctcggttcaatttggggggcttgggtgttacagatataattggttcaatttacaagtaaggatcagatttgctcaataaggtaacagcattctatcagtattttctgattttgagaaaagtattgtgtaaaaatttatgtaaatgaatgtttttattctcaggaaatcccaagtgaagtgtttaggggtaaagggacatcctatctgaaagttactttcaaatggtttagaaaaagtaattacatacataaagatatataataatgtacattatatatagttaaatatgtatatatgcatatatttactttgcatttacttgttttagtttactttcttttttaacttactttctctatataatgtacatagagaaagattgagagaagaagataaactaaacgtgaaaaaaataccagtatttgaggaggctggatgaagaatatgtaagagttctttgtacaatttttgcaactgttctatatatctgaagttgttttaaaatttataattcccaaagaaatcaaatatgggctttggcatcagactaaggctgacatcatggttaaacgatttctcatctccgcaggatgacgtgatcaaaggaaagtacccacatggtagagttgttgaagaccctgtatttaacaatgcatggaaagcattttgcgtgtcattattaaaatatgacatagcacagtgtagtgtagtattgtctatatctatcctctagctagctagctatctaaatatatatctacctaaatctctgctatccatcaattatttctccaaagttctcacagcatttatagtacaattttcctagtcaataaaactaattttatatgtagaagtaaaataatttgatagttgctattttgtaaaggtttatgcactttcagttatttcttatggttagaatacccagaactttgtaaaatttaaaaatatatatttaatctgaagaaaggtcattagcccagagtgaccctctgaaatacagccttttaaatatgcactatggaacaaacaccgctatcaaggtttttgctgtaacaataaagatggttattttagtcatctgtcaattattcatagcactgcaaaacaaagtaaaatagaaaataaaaatatcaaaccaatcttaaagtcagtctggaaagttttatatatatatataatatatatataataaatatatattatatatattataatatattatatattataatatatatattatatattataaatatataacatatatattataaaatataatatattatatatttataatatatattataaatatataatatattatatatattataaatatatattataatatataatatattatatatattataaaaatatatcataaatatatactatattacatattttataaatatatattataaatatatactatattatatatattataaattatatattataaatatatactatattatatataatatagtatatattataaaatatactatattatatataatatagtatatattataatatatattataattatatattataaatatattatatattataaatatattatatattataatatatattataaatatattatatattataatatatattataaatatatattataattatatattataatatatattataaatatattatgttataaatatatattatatattttatattatttatattaattatatattatatattatatattatattatatattatatatttaatatattatagtatatataatatattatataatatattttataatatattatatatattaatattatgtattatataatatattgtatatattatacattatataatatatattatataatatattatataatatattatataatatattatatattgtatattatataatatatattatataatatgtattatatataatataatatatataatataatatattatataatatatagtatattatatataatatattatataatatattatataatatattatatataatataatatattatataatatatattatattatatataatataatacattatataatatattatataatatataatataatacattatataatatattatataatatataatataatatattatataatatatattataaatacattatataatatatattataaatacattatatatcataaatattacatattataaatgtatattacatataataaatgtatattatttatatattatatattataaatgtatattacatataataaatgtatattatttatatattatatattataaatatataaaatatatataataaatatataaaatatatttatcatacataatatatataaaatatatattatgtataataaatatataaaatatatattatgtatatataatatatatatcagaaatttgttccaaagcaaattgattgattctgcgaggggtctccctgtgctaacacgagccagaggaagtgacatctgcagcaaaggcaaacaagagacattgttcccatttctaaaatgttccattgcttcctctaaaagattgttgtttgtttcattaaatagtaactccaagcgtaggtgaagttagcatgcagatgttgaagttataaacaacttttacaagtacacctagttatgaaccagaagactttatttttttttgacgcagagtcttgctctgtcacccaggctggagtgcagtggtgggatcttggctcactgcaacctccacctctgaggttcaaatgattatcatgcctcagcctccagagtagctgggattacaggtgcctgccaccatgcccagctaatttttgtatttttagtagagatggggttttgctatgttggccatgctcgtttcacactcctgacttcaagtgatctacctgcctcagcttcccaaagtgctgggattacaggcatgagccaccatgcccagccgcgagaggacttttatttcactgcatgcatcctgtgtgcctgtgaagggcaatttttatatttagtgtgcaaaggttacaaaaaacctccgagtctgtgtttgagcttcagcttttcttctttgtggaaaaatgacatctttttacctccttttttgccataagttattgaagaatagtgattctgacggttgtggtttgtgggtttgttttttcattttgctgaaattgtcatgtaggtgtttcattagcttatgcagtttgataatttctgtacagtgttctgggaattcattgctttgatttccatttttcccaatttttatgtcaaaatttccacttaccttccaaggttgaatctagacaatgtagtatctcacctctttctttgctttgttctccaagacagagtcttgctctgtcacccaggctagagtgcagtggcgtgatctcagctcactgcaacctccacctcccgggttcaagcagttctcctgcctcagcctcccaagtagctgggattacagggtcacaccaccacacccggctaatttttgtatttttagtaaagacggggtttcaccgtgttggccaggatggtcttgaactcctgacctcgtgatccgcccgcctcagcctcccaaagtgctgggattacaggcgtgagccactgcgcttggccacacctcacctgtttatgatcctttttacatagtttattttgctcctgaacccacataactcttacaagggtatccagccagattcctttggttctcaaagactgttaaatttttctctactgtagtcatattcctttatctttcctgttaaaatccccttcaaatattgtaaggctaaataaataatattcctattctaatgccaggatctaattcactggggccatggtgtctttttctcatataataagttctcaggatgtatttttctattctcatggtctatttccttttattttaaattgggaagtgttccatacagaattttgttttaaatccaaggaagactgataactgaggtgtgatacccttagcttttccagattctcctggggttcattaaccaccagactttgttcaagttcctgctgcagcttctatctggtggtaaatgattgtgtaacaacactgaacatgatgcatttcgatacactgttctcttctcagccttggcttgagtacttagtgaggcctgaggaataattacctctttctccattttcttttgtagctgctaccaattgaccaaaatcagtaagaagctcatgtagcccatgtagggtagcgtcctggggcccccggggcacgaagcaggtggagaatggtgggaaatggggctgaagagacaaatagcaggcattctgcctccaagcacacgtctccgtgtctcactatctggtgccaaatgttcatacacatatatgtgcatctttctctaatttcttgacttctatagtctcctgagagtttacaggaattttcatagtaaactttgcagctcagctttcctggataccctcaggaggaattcaattttttggtcttaggtaatccagttatgcctcttatccctttgcagttttttcagttgaacttcatttattattttagtatcttgcttaagtgtgtggtatcttataaatgctcccctagcgacatctgaaaatatatccacagctataattttcaaacttgggttgaatatgaaagcttttcattctgctgtattggaatgacatgtaaatagagcacctggttgttttggatgtatattgattctggctttttaaaaaggtgttcaaaatttagtgtttgtggaatgaagttattatagagaactcaggatagctataaattcgaattgatttggaaccatattgcatgcctttgggagatgctaagccgttttccttattttttttccttccaatatcatatcattaaggtaataatgttgtctgccagaatttgttgtgatgagcagatggattactaatattttgttgattgatttcttactcagctctgctataaaacttaattgatgattctgccatcaacggtttaagtggtacctattaaagtttagacttggagaccctgcaaaactcttgcccattaagcttggtttttcattttcagaagtatattcacaaaacttcccctatccctagctcaagaaacatgtgtcatactatcacattatactctgggacggtgaagttttttcaacagttttgatttcttgcctgaaatgtgtctgctattatacttgcattgttgttgttagtgaatatttctctaaattcttagcatgaaagaatgaaccccatggcctttttaaaacgtcatatagtcaaatttctatgagacatcttttactgtgtgttatttcaacatgaccactcactgcactgtatcctgagagcagtgacatttctttaaatgcacagcccttcattaaatattgaaaaatgactaatagcaaccttgctttttcaggcaaaattaaaactgtttttttaaatgctcattttccatcgttcttctaaatatgtataatttttggatattggctgatagtatatttcccattcatttatccattcagttattcatggttcatttgtttacttgtatatataattttttaactgtatatatagataatgaagccatacaatgtgctggcgctcttctaagttctagagtacagttgtaaaaaggagggggccactggacttatggagcttatattctggggttcattgggcgcagtatgtcaagagaaataaatttcttagttaatactaggtaccaataagtgccatgatggagatcagtatgggatgtcatcatgcaaacaataagagaagggtgggaggctgctttaggatgctgaactcagccccaaatggcaagattgagccagatgtgcaaaggaccagggggcagagctctctcggctaatgagacagctagtgcaaggcatcgtaagcagagaaagagcttggcctatctgaagagctgaaaggaggacagtgctttgaagagggcagacaggagtggagtgcagactgggccaactcacgttggtcttgtagaccatggcaagaaatctggattgtgttttccaagtggaatggaacactagaggatagtcagtaggggaagaatatgatctggtttacagtgttgaatgtggaatctggtttacaatgtggaatgttaaattgagtgcacaatgttgaatgtggaatctggttgacattgttgaaagactcattttgctgtgggaagaatatggggcaaaagcatcaattagtggtgtgagaatttttccattcagtgtttaaattgaatggaaattgaattggaactcttttaaagtcccaggaattgtcagtcgtttaatcaacaaacgccaagcaactgctgggtgctaggaacagtgctgagtgatgggaaacaaagatggaacaaacaagtcattagacaaaataaaatcacacacatatataacttcattttaaatgtttcaaagctctcgtgtactttatagtaattctaagaaatgcagatttacttaatattgttcaaataagatagcaatttttagtatgcttttttaaatttagcaatgtcaccatcatcataaaatgtgagtagatatatatatatatacactatccttttatattaaattcacaaatggctataaaattctacaagtgttggactcagattataggattaaatagatttagataatagaaataatacacaacctttctccttcccatcttccaaccctgacatctagcaccggttttctaaagttaacttttttccccccaaaaaaggttagatttgatatattagcaaagaccctgcagttctgtatctcaactactttaaagctaacttggaaaagtaaactgagcctaaggagcttttatcatgaatgaaggcttttttctctctagcccgaggcattctcggcagggcaatagattcgggctgtcaacactcaagcaagaacacaaataagggctcaagagtttcattcctttttttttttctaccaatttaatagtcctgcagagacagagagagagagcaagcatgtgcaagagtcagaggtggattgagagttgagttgaatcttttccactacagcatttctcctgcttaatcaaagtgaagaggtcgacttaatttttagtgatatgataaaatgtcttaccatgtagcatatattatgagtcaacagtctttgtttttatttttggacatatttcttacaaaattcccaatgtgaacaactttcctggtattctatattgtcctatactttatttcttttattaccaataaagagtcaaatgcacaccaaactaaaagtccccaaagtttgagactttatcctggaagaagcacatgcttgaaatatgttgtcatttccctttttcttacttaattgtactaacttatttaatattaaacgttagctcgatttttatattagctttctttttcaggcatatcttcagatttcaaaagctattactctgagattcatttcattttaatttaagtgcctttacaggcaagtcttcctttgtgtccctacagacaattaattaatattttcctatggaaagaaaaatgtatatgtttagtattttgcaaaataatgccaattcaaatagagcattatcttcaacatttttcttaaatacaatttatcccactgagcccaacatcaacactatttccttgaaattttctttccattcgtaatcatatgtgagcctgaggagccacttaggaagtgaacctgatcaacagccagtttgcaaaagctgttgctcatcacaggggagacataccatctgcagtgtggtaaatgagtttccatgtggattccaagtgctcccagttctatgagttcattagtttctttctgaagctacaattttgcaacagacatcttcagaaaactttcagtgctatcattatgtttatattacctacgctggtgttgaggagtttgctaattgctactgcaacaataaatgctcattatcttcaagcaaataattaagcagtaagcaccaaatatgaactgctggtcagaggtctatggtggcctgtattagtgcattcttgctctgctataaagaaatatagaaaagagagttaattggatttataagaaaagaggtttaattggctcatggttctgcaggctgtacaggaagcatagtgacttctgctttggggaaggcctcaagaagttctaatcatggcagaagacaaagggaaagtgaggtgtctcacacagcaggagcaggagcaagagcgggtgaagcagctggtgctacaaacttttaaacaaccagagcttgtgagaactcactcactttctattcactaggacagtaccaagtgggatagtgctaagtcattcatgataaattcaaccacatgatccggtgacctcccaccaggccccacctccaacactggggattacaattcaatatgagatttgggtggggatacagatccaaaccaaatcccagctttttcagatcaactcctaatttatctgtgtgacgagaccaaggctttaagtgtttcaggcctagaaacaagttgctgcagtgagaatacgttgaagttgcaagataaaaagacaaatccataattcaagtttcagattccaatacatctctttcaataatagaacacataggtagaaaatcattaaggatatggaagatttaaactgtattaccaatcaacaggacctaattgacttttataaaatattgtgcaaaacagcagaatacatattctttacaagtacaccaggcatatttaccatggtaggctatattatgaggtgttccaattgatctttaacaggtcaatgcataaacaagttatggtatatttatacagtgatatagtaaactgcaataaaaatgaacgaataccctctttcagaaatggacagtttcagcatgtaaataatcagtaaggacatagttgaactcagcagcaccattgtagcatgatgagtctcccacccattagccaagggtatatgtctaccacctaaaccttgaagaccaggcagtgagccaaggctatggggctcagccaagtagcaggtgttcctgagaacctaagcatcctagaaagtgtctgagaacctagcaagaaaaatagtctcagcacttaaacacaatatacaaaaattcagaaaattcgcttaaaagtagtttaagaacaagaggtggtgtggagctctaaagctgtcctgctgccatccaggaggtcctcatatataagtccttataacccatctactcgccaaactggacatgtccaaattttttttttttttttttttgtcaacaacctcccaatttgggggaaggtttttctgtatgattctgggattttctcattgcagccattgatcaactggatataattgacctctatagaccacttccaccaccaacaacaacagaatacatattcttctcaagctatcatgaaacattcaccaggacacagaacattctgggccataaaacagccacctttacaaatttaaaagaatagaaatcatagaatatttgctctcgactacagtggaattacactataatgacagaaagacagatggaaaatcccaaaagacgtggaaattaaacacaaacttctcagtaacacatgagtcaaataataaatcacaagagtatttgaaatcagatgaaaatgaaaatataacttattaaaatgtgtggatacagtgaaagcagtgttttgagaaatctacagcattgaatgaatatattagaagagaaaaagacctaaaataaatcatctcagtttctatgttagaaaagtagaaaaagaagagcaaattaaatccaaaggtggaagagaagtattaaatttagagcaaaaaatcaatgaaattgaaaatacgaaatcaatagagaaaaatgaatgaagcaaaaaaaaaaatggttatttgaaaagattaaaaaatcaataagactatccatgttaagtaagaaaggaaacacaaattactaacattggaaataaaagaacatcacaatagatctcatgaacaatgaaaggcttataaaggaatattatgaacaaatctatatttacaatctgataatgtagctgaaattccctgaaaggcacagctagtaaaattcacagtagaagaaatagacagtctgaaaagaatggtacctatcttaaaaattgaatcaggaattaataaccttccaaagagaaagcaccagctccagttaggttcactagtgaattccacaaaacatttaaggaagaaattttaccagttctatacaatctctttcagaaggatgaaactgcagaaattctttctaattccctctatgaagccagcattaccctactacaaacaacagagaaagatattgcaagaaaagaaaactacagaccaagatcttgcatgcgtatagatgcaaaattcctcaataaaatatgagcaaatcaatgtattgaaaaattataacatgcagccaactgagatctatgacagatctacaagggtgttcaacatttgaaaatcaattaatataatccatcatatcagcaggctaaagaagaaagatcaaatgaccatatcagtagatgcagaaaaagcattcgacaaaatcaaacacccattcatgatttaaaaaaaaaaaaaaaaaaaagctatttgcaaactagagatacaggggaactttctaaacttgataaggaatatctacaaaaaacctacagtgggcatcatactcaatggtgagaagctagactctttgccattaagatcaagaacaatgcaagaatgtcatttcttaccactccttttcagcattttactggaaggcctaactaatgcaagaacaaaagaaaatggaacaaaacatataaaattgggaaggaagaaataaaactatcattggtagcagatgacatcattatatatgtggagaatacaaaagaattgaccaaaaaaatcccccaaactagttagtaattatagcaaggttgcaggatacaggtttaatgtgcaaacgtcaattgcttccctctgtaccagcaatgtacaagtggaatttcggattaagaacgcaataacatattagctcctctaaaaatattattagctcctctaaaaatgaaatatttaggtaaactaacaaaactgtccaagatctgtatgaggaaaattacaaaactgtgatgaaagaaattaactaaataaatggagaaatagcccgtgttcatggataggaggactcaatattgtcagaatgttaattcttcccaattttatctagagtcaatgcaatcacaataaaaagtccagcatgttaacttgtgaatatcaacaaactgattcaaaagtttatatgaagaggcaaaagacccagactagccattgcagtattgaaatagaagtataaagtcagaggactgacactatccaattttaaggcttaactatacaaaactacagtaatcaaaacagtgtggtaatagtaaaagaatagacaaatcgatcaatggaacacaatagacagcctaaaagtagacccatacatagtcaaatgatctttaacaaagaagcaaagaatatacaatggagaaagtgtagtctttcagcaaatggtattggaacaactggatgcaaacatgcaaaaacaaaaaaatctggaaacagatcttgtactccttacaaaattaaaactttcatagtcctcactgttaaagtgcagaactataagactccgagaaagtaacactggaaaaaacatagatgaccttaggtatagtaataactttttagatacgataccaagtgcataatccatgaaagaaataattgataagctggattttattacaatacaaaacctcagctctttgaaaagcagctgtcaagagaatgaaacaagccatagactgggagaaaaaatttaaatagacatctctaatgaaaaactaccatccaaaatatacaaagaactttaaaaactcaacaatacaaaaacagacaacctgattaaaaatgggcaaaagacctgaacagatacttctcaaggaagatataaacatggcaagtaagcatataagaagatgctcaacgtcttaccatgttagggaaattaaaatttaaaaaaacaaacaaacaatgagataccagtacacatctattacaatggccaaaatccaggacactgacaccaccaaatgctggggagtatgggaatcaagaaaaactcttattcattactgatgggaacgcaatatggtctcatcactttggaagacagtctggcagttttttacaaaactaaacatagtcttaccatacgatccagcaatttaactgcttgctgtttacccaaatgaattaaaagtttatgtccacacaaaagactgcacatggatatttatagcgactttattcataattgccaaaacttggaagcagccaagatgtccttcagtagatggatggaaaaatataacaagtctttaaatgtaagtctttaaaacaaaattttgttctaaagaactcacgcatagttaattttaccattaatataagcatcttgttactattagtatttctttgaaatataattatcagtatttttcaagttgctagtaactcagttcatcatttattattattgttattgctattattattttggtctgtggaatctaaaatctggcatccatatgcatcaagtaaaaaagtcctctaaagcttgtttgcggaaattagctgaccaaagtgtcctgttttcccacattcatgttttggtgcattagtcttggtaacaaaagtagttccatttcatcattcctatctgtgcctaccactgcagctaacaatcaccatagtgcaatcactcctcacctcttgccaccttcttggctcgggcattgtgctttatttcgtgtgactcttggacctcgcacattgcttagcacatagaaaatgcaaaatgaatgccattgcataaatggacgtgccatgaaatatttgctcatgcatagatggggattcactgcttgtgctttcaccttttcactacaagacacgtttttatttttcaggaattgtggagcaattccgaggtagggacagtcactctttttcatgatgctgttacagcaacagtcaccagtaaagtccagtgtccagatgggcacaagaggagttcacttcctgaaatcaattgcagtgacatctcctccgccccaccccaagcaggttgtcaattttacatttatccagactgcctcttctctaagcagttgacactgattttgttcgttgttattgctgagacttgatagctcactgtggcaatgattctgagaggtgtgaagaggggtttataggagaatcgcttgtggtggaggcaagctgtgtataattctgtgttgcggttgttagaaatccttcttcaccctttcctaaatctactgagaatctacttatctttctatcaaatgtttttgtgtgttaagaggacaaaataaagtagaatgtttttcattctcaaaagactagaaaatgattatgggattgtgaggaaaattacctaaacacacatactcagttcacactactcatctttggaaacaaactgacaccataaattacttatttccacagtatgatttccctgaagatcccatttatattgaggcattttgggggttaggaaatatactggaaattgacccgatgacaaatttacactgcaagtatgtataacgggattggatttctcttacactatcttttattctctcaagactttcctggagcccaggcaattcgctgaaacttcctcttattgaaagtgtaaataaatgttgttgttttttaggaatggcagtctaagcctgatatacaaactgtagctaatgaaacagtagctacctgctaccagagtagaaagctgtaactaggataactggatggagccctggccacatgtgaattgcctgctgaggttacactcattttatctttgtcagataaagatggaaattggacaaaacaaataaatatttatttacatgcaaatatatgggggttttcatatgtgtagttaatagattgtttccaggttcataagaggaggttataaaatatttagcaacacatgacttcatgccaactatgatttactgagaaatgaagcgtttcttggcaaccatcatagcacgaataaagatttatgacagtgtatctactttgtgtgtttgaggagttaaggctgataaatgggctgaaaatagtcaactcattattctcatattcatagactatccaaaagtgatatagttactgcttcctcactaaatcttagatgggaaatctcatacttcccaaaaatccctataaagaaaagatgactattgtatttaaaagggctatataataaccatataatatatgttttatgttttttaatatattttgcagtatatgtggttctttatttccacattattgccatataaaccatttctgtcagctgtctttcccatggttatgaaggtcatcaaagctcgtcattacctggctcctgtattttaggacacaggtccagccaactacgagagggcttttggccatttttgcacagatgggcttatatataaccagccaagtaatgatacattcattgagcaccaggtgttggtgatgaaaggaatgtttgcagctaaaaaatattgataactctgtccaacttgagtttaccctcatgtattttggtttgggaatggtgtttctatcactaactgctggttttctgaaaagaaactagatttgtacatgtagagtgaggaagagtatttcacagtcaccacagaatagcaggtgcctgatatcacttagtatgttctgagtagacagattgacccaactgattggaaaagtgtaatatgagtaacagccaccatgcctctaccacagtgccttgagagatgccatctagctggctggtactgagttaggtgactggggaaaagaaatttcttgcttatgtgattgagtccccatgtaggaaggcacagagacactgcacaaaacccacaagttgtaaatgatgtccagttatgtggaatggcttagatcaagttcccagccgtccagaggaattagcaacagaaccccaggaggctgatttttatacctcctgttctaaggagaaggttgtagtttgtacctctcagtaacataaaattaatgttttcctaggcttccactgcagggtagaaataaattttttcgcagaagtcactatatttaatgagtatacagatctatgtatataaggaaaataacttcatttaatgcaccaagaagtagaatggaattgtctatggaatagagcacgttgcgtcgaatgtgctagccacctagatctcagtttattacgtatttcattgtacatacttattgtcattcgagaacgcaattgaagcttgctcttttatgtgtatagaggtagactaggtttgcaagatttatgggtcatttcagttgtgagctagctacccgctgatatgagtccaatgtcaaggggcacatgtaagtggttgggttgttttcagcgtgatttccttttgaagcatgatgatttaggtgctttctccatgttaatttaaaaaaaaaataaaacgtttttcccctagaaaattgtacaacttaatcataaacttctcctgtatctaaaaatatattttgggggtaggctgtttttcatacttatactgttcccttcacatatactaactaatgctgaatagtgttgttatctatgtaaatataaaagtattgaaatagcaatacatgttaacgtaactattaaatttataacaaatagagagtctgctattcttcatttaattagctgaaattacttataccagttacatgtaaatttgattaagaggagctaaaaattggggaaaataaagacgcaaattaatttcagtaaatttggaataccattagagattacagtattatttttgatggatcagtcaaccacattttggcaaatcagccaaaaagaaaataagcggggtttaaagtaaagtatgtagatactgctggcttgaagaaacatataggaaccttttatttgggtcagttcaataaaggtccagtaaccagaatgggattaatgttcacctttgactttggaaaggtatttgtccagtgcctggcttattttgcttaacataatgacttctagttcatccaggtttctgcaagcataggatttcaccctttttgtggctgattagtactcgtgtgtatgtgtgtgtgtgtgtgtgtacacaccacgttttctttatccatttatctgttggatttacacaggttgactccatatcttgacctattgtgctacaataaacatgggggtacaggtatccctttgatatgctgatttccttcctttggataaatacctagtcatgggattattggatcatatggtagctctaattttggggattttttaattttttgtgaaaatggggtcttggtatgttgcccagacttgtctcaaactcctggactcaagcagtcttcccacctcagcctcccaaagtgctgggattacaggcgtaagccaccttgtgcttttagtttttggagatgcctgcatactgttttccagaatggctgtactaatttacaggttacaacagtgtataagagttgccttttctccacattctcaccaacatttgttattttgtgtctttttgataatagccatactgaggtaagatgatatcttattgctgtttggacttgcatttccttgatgattagtaatatttaattttttttcatatacctgttggccatttgtatgtcttcttttgagaagtgtccattctaaccttttgctcactttttgatgggtttatttgtatttttgcttttgagttttttgagttccttgtgtattctgggtattagtcccttgttgaatgaatagtttggagatattttctcccattctacaggttgtttctgttgattgtttcctttgctgcacagaagcatttttgcttaatatagtcccatttatgtactttttattgcctgtgcttttgagctcatggccataaaaatctttgcctagaccaatgtcctgaatgttttccttgttttcttctagtagttctatactttggggttttatgtttaagtcattctgccttgatttttgcatatagtgagagataagggtctagtttcattcttcttgtatacatcttgcctagcactttttattgtagtgtcctttctccaatgtttgtcattgttacctttgttgaagatggttggctgtaaatacactaattgatttctgggttcactattttgttccattgctctatgtgtatgtttttataccagtaccctactgttttggttactatagctttgcagaatattttgaaatcaggtagtgtgatgcctccagctttgttcttttgcccaggattgctttggctactcagggtcttttgtggttccatacatattttaggactgttttttttttttctatttctatgaagaatgatattgttattttgatagggattgcattgagcagtcattttaacaatattaattcggtcaatgagcagggcatgtctttccattggtttgtgtcatcttcaatttctttcatcagtgttttgtagttttccttgcaaaggtcttctacctccttggttaaatttattcctaagtagattttttggtagctattgtaaatgggattgctttctttatttttttttcaattagtttgttattggtatagagaaacactattgatttttgcatgttgattttgtgtcctccaactttactgtatttattagttctaagagttttttggtggagtctaggtttttctgtatataagatcatgttgtctgcaaagagggacaacttgactttcttttttccagtttggatgacttttctttcttgtacctgattgacttggctagtactttcagtactatgttgaattggagtagtgagagtgggcatcctagtcatgtttcagtcctttagaggatagacgttcaccttttccccattaggtatgttccttctatgcctagtttgttgatgttttatcatgaaggaatgttgaattttgtcgaaagctttttctacatctattcagatgattatatgggttttgtccttcactttcttttttttttttctgcacaccatgcttctatatgtccttcattatcttgatgtgatgtatcacatttattgatctgtttatgttcaaccattcttacatccctgagaaaaatctcacttgatcatgatatgctattttgttgaggatttttgcattgatgttcataacgggttgctatagtttggatatttgaccacccaaatcttatgttgaaatttcatcaccaatgttagaggtagggcctagtgggaggtgtttgggtcatgggagcagttcctcatgaatagattaatgccctgtctcaggtaaggggctgtattagttctcatgaaagctggttgtttaaaaaagagcctggcaccttcacctgctctcttgccttctgtcatgtcacatgatctctgcacatgctgtttctcctttgccttctgctgtggttggaagcagcctgagcccttcaccagaagcaggtgctggctcagtgcttcttttacagcttgcagaaccgtaagtcaaataaacccctgttctttataaattatccagtctcaggtgttccaatatagcaagacaaatcgactaagacagtgatcttggcctattcctttcttttgttcttgtatccttatctggttttggtatcaatgtaatgctggccacgtagaatgcattaggaagaatctcttcctcttcacctttttgaaatagtttaagaattgcttttagcttttctatataaatttgatagaattctgcagttaatccgtcttgtcctggacctttccttgttgggggacttttaattactgctttaatctcactactcattatgggtctgcttaggttttctttcttcctacttcattcttggtaggttgtatgtgtccaaggtttatatatttcctctagattttccaatttgttggcatgtagttgtttataatagtctctaatgattctttgtatttctgtggtgctagtggtaatgtctcctattcgtgtatgctttttttatttgagtcttctatcttttttcttggttattctaactagtagtttgtgatttttatctttttcaaaaaccaagttgttattgttgtaatcctttttacatttttcttgtctctatctcatttagttccactctggtctttattatttctttccttctactaactttgggtttcctttgtcctttcttttctagttctttaaggtacattgttaggttgttaatttgaagtctttctacttttttgatgtaggtgtttattgctataaacttttctcttagcagtacttttgctgtatttcacgggttttaatatattacatttccatttttaattctctcaagaaattttttggttttcttcttagtttcttccttgacctaatggtcattcaggagcatgttgttaaatttccgtgtatttgtacagttcccaaagtttctcttgctatcatttctagttttattctgttgttgtctgaaaagatattaatatctgatatgattttgattttaacaaatttcttgagacttcttttatgtcctaatatatgatctattctagagagtgttccatgtgccgatgagaagaaagtgtattctgcagcttaataatatgttctgtagaagtctgttaattccatttggtcataagtgcaatttaaatccagtgtttctttattttctatctcatagatctatccagtgctgaaataggggcattgaagcccccaactgttgtatcagggtctatctctccctttcaatctataattttttaaaaaatatatctgggtgctctgctattgggtacacatatatttagaattgttacatccttttgctgaattgatacatgtttcattatatgatgatcttctttgtctctctctctcttttttaaagacagaatctcactcttttgcccaggctggagtgctgtggctcgatctcagttcacttaaacctctgcttcccaggttcaagcagttctcatgcctcagcccccctagtagctgggattacaggtgcgccaccaccccactcaactaatttttgtatttttagtagagatggggtttcaccatgttggccaggttggtctcgaactcttgacctcaagacttctgccctccttggcctcccaagtgctgggattacaggcgtgagctaccgtgcccagccttctttgtctctttttagattttttgacttgtaatctgttttatctgatgtaagtatagctactattgtccacttttggtttttatttgtatggaatgactttttctatcctttcactgtcatctttatgtgtttttataggtgaagtgtttttcttgtaggcatcatatagttgggccatttttttgttgttgctttgttttgttttgttttttgagacggagtttcactctcatcacccaggctgagtgcagtggtgtgctcttggctcactgcaagctccacctcctgggttcaagcaactctcctgcctcagcctcctgagtagctgggatcacaggtacccaccaccactccaggctaattttttgtatgtttagtagagatggactttcactgtgttgggcaggctggtctcaaactcgtgacctcaggtgacccgcccgcctcggcctcccaaagtgctgagattacaggcatgagccaccacgcctggccagttgggccattttttaaaattcatttagccatttattatcttttatgggggaaattaatccatttacatttgaagttattattaatgagtaaagacttatttccatcattttattagttgtttctggttgtttcgcatatgctttgttccttctttcccttttgttgtttatcattgtggtttggtggttttctgtaatagtagcatttgagtccttcatttctcctttgtgtgtctgctctaccattgagttttgcacttttgtgtgttttcgtgatggtacatattgtccttttccttccagatgtagaatttccttgagcatttctcataagacttgtctagtggtgatgaattccttctgtttgtgtctgggaaagacttaatttctcctttctttttgaaagatagctttgttggtagaatattctttcctagcatgttttttcattcagcactctatatcatcctattctctcttgcctgtaaggtttctgctgtgaaatctgctgtttgtctgatggggatagctttatatatgacatgacacttttctcttactgtttttagaattctgtttgtctttaacttttaacagtctgactctaatgttccttgaaaaagacatttttgagtcgaatttatttgggattcttggagctttttgtatctggatgtctaagtctcttgcaagacttgagaagttttcagatattattttgttaaataggctttccatgtctttgatcatcacttcaccatctggaacaccccaaattccatttgtttgctttgtggtgtcccatatatcccataggcttactttattttttaataattttttaaaattttttaactgggttatttcaaatgatctcttttcaagttcagaattcttttttcctctccctgatctcatctttttttgaagccctcaattgtatttttatttcattcattgaattctccagatccaggatttttgtttagacatttttaaaaatatctttctctttgtttagtttctcattcagatcatgaattgtttttctgatatttcgtatcttttatttgtgttctatcatatctcattgagctttttacagtgcctctgatgtagcagttgcttcttccaattttatggattggcttttttagaaaaagactacttttttctacagatgtatttataatgttgctttggtaggtcaccttggctttgattctagctgggcacagcagtgtaatgtctcaatgatttcttcagctgtaatcagcatcagttgtgtctgtgatctcttcagtggctcgggcagcacttgttagtagaggttgcagtgaagcttttgtggggacagggacaccaagtgggctggtcttcgggcacagtggtggcaccagtggtttgggtatgccaaactttgggcctccagatagtctgcttatgtgctggcagtggtggcagtgggctgggagggcaggctggtccttgggctcctgggtggtgtgtggcatcattcatggcaatagtagtggcaagccacatctctggttcctagtcagcatatgcaggcaccagtggtggtggtggcagggtaagcaagccagtgctcaggcctccaggtgatgcatatgggtagatggccagcagtggtgatggcagccggctgagtgggcccatcctcagtcctctgggagttgtgtgtgagccctggtggtagcagacagggagggtcgttccccagtcccacagtcaaagtatgtgggcaccggcaggctgagcaggcccatcgtcagggccctggaaggtgctcatagccattaatagcagcatgtggggcagatcaatccccaggtctccagatgaagcatgcaggcactgtcagtggtagcatcaggtggggcagtcctgtcctcaggtccccaatagtgtgtgtgggtgcaggctgtggcggctgggacacattggtccccaggtccccatatagcatgcttgggtgccagcagaggtggtggggggtgtaactgacctatcctcaagccccagatggtatgcacaggcatcaaggacagggcagacctgttgacaggccctgcaatcatacacagttgccagtggcaacaggtatggtaggttgacccccaggctcccagttgatggtatatccacgcactggtgggaacagcagcaggaaggcagacctgtcctcaggccccctgatgtgcatgggcaccagctgtaacgggtaaggctgtttgatccccaggccctggatggtgtatatatatatttccaggcactatgaaagtaagaaaggagtaagtgtttatttcaaagtgtcaggatatcataatcttcacatatccatcaatttaattcatgctatctaaagcttaaaagagatgtgtgtgattatgtccatagtgaatccaaatcacttgatcaaacttagaagctgtttgtactaaagctcattgtatgtctcctaatgctatacctaatgttaaatgatgagttaatgggtgcagcacaccaacatggcacatgtatacatatgtaactaacctgcacgttgtgcgcttgtaccctaaaacttaaagtataaaaaaaagataaagctcattgtaaatatttttttaaaaatcagctaaattaaacatgataaagacagctaccataaatttgattaagtaacttaccaaacatgttataataatcaggcagtcaatgaaaatgctctgtagtactggtattatccattgggtagctttaacccacagaagatcttttctgcaatttttttttgggttccgcttctctgtgtttatgatttatatattgatgtcctcactgtcgtgttcatggctctgagctttcactcatgatttccattttattaataggttttctctgtttttactcttcttttttagcttttaattaaattttaaaattcttatattctcaagttatgtttaaacctgattgaaacactttattgtgtcctagttatgtttcctgaaaatttttctttttatttatttattttattttattttattttgtttttttgagacggagtctcgccgtgttgctcaggctggagtgcagtgcgggatctcgcctcatgcaacccctgcctcctgggctcaagcgattctcctgcctcagcctccttagtggctgtgattacatgcgcgccccactacacccagctaattttttgtatttttagtagagacgggttttcaccacgttggccaggctggtctcaaattcctgatctcaggtgatccgcctgcctcggcctcccaaagtgctggcataagccaccatgcccagccctgaagaattttctttagattaaaaaaaaaattttttttcccctttggaagaactgactcttcctgacttttccccaacagtgatggaaggccggggccaccaacttttctctcctggtgggggcatgagctgtacaggagtcttttgccctcacacacaaactgtgcccatagatgccatcgcctgagaattgttctataatgataagcctgggctaagagggagcatcgttcactctaacagttcctcttcttgccttgtgggatgtttctttgtttttacatatgcctcttagcaaccggatgatgctgcactatttgccatcctccttctttgcctctccaacacagcatacatttctcaaaaaatagaggagagataaacaaataaataactttaatggtgtccttatgacacaaaaggtttgatgttatttaacttattttagatgcagtattaattggactccgaaatttttcagtcaatctatgtaacatcagcccttgatatccacagcttctgcatttttgggttcaatcatcggctgaaaatattcaaaaataaaaacaaaaaataacacaatatttaaaaacaaatttaaaaagtaatgcagtgtaacaactatatactcagcatttacattgtattaggtattctacatgatctggagatgatttagagtacacaggaggatgtgcttaggttatatgcaaatactacaccatgttatatcagggacttgagcatctgcagattttgctgtctgcagggggtttctggaaccagtccctcctggatactgagggatgatcatatgtataaagcacacatgtctacgcccatcgatatatattttacataagtaggatggctggttgagtttttaattcttccattggttatcacttgtactggcatgttaaaagaaaaaactcagtgtaacatttattttccagttttattcatcttagttttccggtatatggtttataggtaaatttacaaattacattttattttcttcttttcctaatgaggaaataaagtaaatatatagaatgtgagaaagtattaaattgtgttaagcacttgcctttgcccagtttatcttgagtggaatgtttatgatggcttgtgctgcctgcaataaagaagacacgaataaaaagaagctttaaattctacttgctaaagaaacaaggacttttgaacgaaaaaagtttagattccaagtctaaagtcatttaaaatgttttaaagctaggctgtttttttattgctcaatatttctttttgctcatagccaacaaaccagttatattatcattttgtgaagtattgctatcaaaaggtatgtttctcttgcactttccctgcctagactggacactgtgaagttgctgtggctgcatttctcaggtctggctgttccgctctcacttggtccagggagtgggggggattttccaaataaacagcacaatggattcaacagcagcagtaaatgttaggaggaatatgtaggtgacagaagctctcgtcgcacctgacttctcaatgaaaccagtgatgaacccttccagtacaaaaactaagtgaactacacctccagctgttgagccctcctagttctcaccccactccagctcttcccctctctcagttgtcccaattgtaactcaaaagatggaatatcaaagtcttaaaaaaaaaaaaaaaaaggacactgcagactaaccaaagagcagggagagaacagagtgaattacttaattcccaagaatagtgatgttggggagggaagacctaaattggggattagctcaagagggtttttagcttcacctaggaaagaattcaagaacaagctgacagtagaggaaaaccactttattgaagcagcagtgttatagctccggtggtgttacagctctgtgactgcttctgcagagcagggctaccctgcaggcagagagtagcagctcagggcagttctacagtcatgtttatacctacttgtaattacatgcagattaaggggcagtttatgcagagatttctaggaaaagagtagtaacttctgggtcattgggtcattgccatggaaagggctggtaactcctggatgttgccatggcaatggtaaactgacatgacacactggtggatgtatcttatggagagcttaggcaccggacataattgaggactagctaaaacagggacaggatcaaggaaggcctccagggttgaagatagatacactgaggccgaaagacatctagggctttgaaaggcaaaatgagtggacaaagcagaggaagaagacagatcctgctgagctcaaaccacaagcaaggggccagagtgaaggggggaagtccagcccctcctcaaagggtctccatggcaggccaagggagaggtgggcaggtgaggtgggaggcagtgaggcaaggaggttagaaagtctacaaggccttgctcggccagtgtgcttggcctggaagataattaacccagacagtgaaatgattacatagctcgtctacattgtttgccattgttaattagaataagtgttttgcacatttagaaataaatgtaaaataatactgtcttctagagactccctagaaaatgttaggaatatagtaactcatctagggatggtgagtcataaggaattttcaaaattgtgacctgtctcctcagtttctcgtaaataattaccagctaacacatgttcgtttatatgtcctctcctggaggtcaaatcatggagtcgaacactcggtggtgggagattacaaaaggaaatattccatgttaacaaccagatattttaacatcttatttatctgagcacaaaagctggaaagcttggcctaaacatgcaactagcaaatgttttgggtgccgttatgttcttgaagctgacatattatgagagcatgtgaaacctttagcttctaaaggagagaaagaacagctagaataataaatgttcttttattgtcgggctaggctacaaaattgaaagggaagagatatgctcgatttataaactgagcagatgacatcgcataagtcactgcgattatgttgaggtgagacaagttacaatctccaaacgtttgttggaattgggagagaaatgcaggggaagctggtaccacaccagagccactagtccaaaacctaaggaaagaaaaaaacatggttgctgtgttgtgtgtaatcccgatccagtttcccctgagatggccattcctgcccaggaatgagtcagaggtcagggagggctgcttcatctggccagcagggtcctcctgctcactctcagggaggctgtgcagcgtggaactttgacaactgtcccatagttctaaagcgtttggagtcagggacccttcatgaaatgctaacagcaagatcatatgcacaagtaaagaaatagcaacaaacatagtggaagcatttgctctgaaaaattccccagtgatagattatctaggggacaacgcctaaggtcaaagctttctccaagataataaagataataaaggaaaatccttgttttgcagtctgacagataatatggaaatcagtcttggaagtgcctatgggcactgctaaattaaagaatgaaaaacacagccagggattagggtggctcacacctgtagtcccagcactttgagaggcaggtggatcacctgaggtcaggagttcgagaccatcctggccaacatggcaaaaccccatctctactaaaaatacaaaaattaacccagcatggtagcacacgcctgtaatcccagctactcgggaggctgaggcaggagaattgcttgaacccacgggacggaggttgcggtgagccaaggtcacgcctctgcactccagtctgggcaacagaatgagactccatctcaaaataaataaataaataaaaattaataagtaactggggaaacatcaggcatagctggatccagggtacaagtgatctctttcttggagactgtctttctctcatcactttttccttctgagcaccggcttggttctcagacaggtatctcattgtggtcacatgtatgagcctgttttactctgaccgctgaggccagagctgcctgttcacccctgggctggggaggggaaaaggaggtacagccatctgagcttattggagcaagtaccttgagctgggaaagagaatattagttttcctagttttcacgcattttataagggtcagtaatgactgcaaaccttttattttattttttttttttttattatactctaagttttagggtacatgtgcacattgtgcaggttagttacatatgtatacatgtgccgtgctggtgcgctgcacccactaatgtgtcatctagcattaggtatatctcccaatgctatccctcccccctcccccgaccccaccacagtccccagagtgtgatattccccttcctgtgtccatgtgatctcattgttcaattcccacctatgagtgagaatatgcggtgtttggttttttgttcttgcgatagtttactgagaatgatggtttccaatttcatccatgtccctacaaaggatatgaactcatcattttttatggctgcatagtattccatggtgtatatgtgccacattttcttaatccagtctatcattgttggacatttgggttggttccaagtctttgctattgtgaatagtgccgcaataaacatacgtgtgcatgtgtctttatagcagcatgatttatactcatttgggtatatacccagtaatgggatggctgggtcaaatggtatttctagttctagatccctgaggaatcgccacactgacttccacaatggttgaactagtttacagtcccaccaacagtgtaaaagtgttcctatttctccgcatcctctccagcacctgttgtttcctgactttttaatgattgccattctaactggtgtgagatgatatctcatagtggttttgatttgcatttctctgatggccagtgatgatgagcatttcttcatgtgttttttggctgcataaatgtcttcttttgagaagtgtctgttcatgtccttcgcccactttttgatggggttgtttgtttttttcttgtaaatttgtttgagttcattatagattctggatattagccctttgtcagatgagtaggttgcgaaaattttctcccatgttgtaggttgcctgttcactctgatggtagtttcttttgctgtgcagaagctctttagtttaattagatcccatttgtcaattttgtcttttgttgccattgcttttggtgttttggacatgaagtccttgcccacgcctatgtcctgaatagtaatgcctaggttttcttctagggtttttatggttttaggtttaacgtttaaatctttaatccatcttgaattgatttttgtataaggtgtaaggaagggatccagtttcagctttctacatatggctagccagttttcccagcaccatttattaaatagggaatcctttccccattgcttgtttttctcaggtttgtcaaagatcagatagttgtagatatgcggcattatttctgagggctctgttctgttccattgatctatatctctgttttggtaccagtaccatgctgttttggttactgtagccttgtagtatagtttgaagtcaggtagtgtgatgcctccagctttgttcttttggcttaggattgacttggcaatgcgggctcttttttggttccatatgaactttaaagtagttttttccaattctgtgaagaaagtcattggtagcttgatggggatggcattgaatctgtaaattaccttgggcagtatggccattttcacgatattgattcttcctacccatgagcatggaatgttcttccatttgtttgtctcctcttttatttccttgagcagtgggcaaaccttttattttacttttcaggaatcacttttaacatcttctttaacaatctcccttttgctcttaaagttataaacatcaaattatggctgagtggcattacacctggaataaacttcaaggcacactgaagaacttacaatcaggcagagaaggggcggatgtgggttgttatattagccaacttttgttttaagttagacttcttgaagacatgtaccataaactgacagcctccttctcagcaaagttgtgacatggttttgctttgtgtggagtatattgattttctttctcctgataaactttgcacatcatctagaggctttattgacatcttgagagaaaacaaacttgtaattgaacatggtgatagactcattaactttttaggtctgatctgtttgactaggtgtaacttaattgtaaaactggcattgttaatttaacaaagtgtacatttattatatagtcctccagtttgcatagttactttgtatcagaactgataaattcagttactgggtttatgtaatacccagtaagtcgaacacttcagtatgaaggctaagacacaataaagaagtcacaagataaacaggctttgccatggctattttaaaggctttttttatgtattaggtagagaatgttgtggttatgctttatctggcattttttggtttgtttttgtggagtttctgtttgtttttaaagacagggtcttgctatgttgcccttgctggtctcaaattcctgggctcaagcgatcctcctgcctcagcctcccaaatagctgggacaatgggtgtgttccaccctacccagctgacatgttttaacttaaagaaaattaaaactttattattaagattaataatgaaacctctgcatggataggaagacttaaaactagtagttgtgtcttagaaaagaatctgtatctcactaacgaggaactattctagcctggacagtttctgaggagagagtaactggggaatatctgttgctgttagctacaaacaggattttaggtttgtgagaggcatttagattgatttgaagtgacaggctgtctgtcttaacttggtaactgtgagaatctttctgatatagatgtaagatacttattacgagttcatctcataagcagtaaccacagccctgtatcctgttaatatcatcggaaaatttggatggatagtcttttgacgagtatagttgagtttaatctcaatatacaatgtatatttgtgtgagtatttctgtatcttcaatacatatttcacaacaatatctgaatgtgtatttttgtttttagtggaggctgattagaatgtgtcaccactaacaaagggtgacacttggagaattttgatctcacacagggtccacctcgtggtggtgcagcagtcatctgctggtggctttcagacccaagccaccttttccccctctctgctctgtaagttggggctgtttctggagatgggagggccaagagaaggcagaagccaggggcatttctccctctctctctaggggacatctctggcagtggcttcatcccattcattgtcagactcccaaccagatagcccagctgcagagctgtggtgactccaataccttctcccattgtcctctagccccagatggcagctgtgcaataatgacgctaatctcaagtggcttcctttctctgtttagttcttctgtgcttccactcctctataactaatctcattcaattccgtcagttgaactacctggtgtgggccctgttttcctaactataccctgagccatgcaaatagctatgcagttacgtgttaagtacaaaccctataccctttgcaaccttgttagtggaaagtgtgtgtccccattactttatcaagagaaggatagtttttttttcttttgggaaatattaactaagaaggatttggagacaagaatggaatttaactctttgtgaagatagatacaatatttcgtttggaaaacataattgttaaacaatatctataaacataaaatttaggatgttcaataaaagctattggaaggatcatgggtaactaagtcaggtcttactgctaatgattttttcagatttgaccatattaggactgtgataagcagggctttcaagccagttgtcatctacctttatagtaatttgaaatctatcaaattgtatttgggtttggctaattcgcttctgatcgtaaatgtgtttatacagttggattcttggtgtcaatctaattttcagattttgctgggctatttattccattcttcttgctctagttttcctctttgtgagtggcactgcttatgagtcatgggtgaagggacataagtgagcaggagtggcttccaggaataccacagtccagttgacatcttcctgctcttctcccctggtccccctttgatttgtatgggtctgatgtgatttggagggtcaggcttcgacagtgaggaggagagggcaagtgagttatgatgaaagagaagaatggaaggaagggatcacagccttgtccagagaaatggtaaaagcatgagtagcctttctaagaacttgaggaatacaactttgttgggttttccatttaatactaatgaagtggaaaacggtccgggcgcagtggctcttgcctgttttcccagcactttgaaaggctgaggtgggtggatcacttgaggtcaggaactcgagaccagcctggccaacatggtaaaacttcatctctactaaaaatacaaaaaattagccaggcatggtggcacacacctatgatcccagctattcaggaggctgagacatgagatttgcttgaaactgggaggcgtaggttgcagtaagccaagatcgtgccactgcattccagcctgggttacagggggagaccgtgtctcaaaaaaataaataaagttgaaaacgcttatggcatttaacagtgtcacaatataaagccaagcacattttctaaagccttatttttttcaagtataaaatcatttaggctatcatttggaaaaacaaaaacaaaaaactggccatttgctgttatagattttagctctcttcgctaattaaggtttcccagaagtgactattggtatacaaatgatgtgagtaagcccctgggaattatagctcctggttaggtgggggaatctttctgtagctgatttatctgtgaactaccatttgtaagaggtggggtgggccgctctgagactcagtttacccgccgtaaaggattctgttccagccacactagaattgacagctgggcttcctgatgaagaggacactgcccggctgctcccccagaatactctgcttccctagtgaccgagaagcaacttccccggccaacccctgcacacgctagaactcaaacaatgccaccttgagcagccttgcctcaggcataaccactgtcgctcagcacagctggagatgtttcttggccacttggcttgggccctgctatgccccagtgacctcacagtggtgcagtggtgccagccttctgaccagccttcttggactccagctagaaagctttcctgtctttgacttttttaattttttaaactgagtaattaagagaaacaaaacagaattcagaggcagttaatcccaaagaatcatgccactgtctgtgagatgacacccatgtgtgaacaagccatctcagacacccaaggtggaattttcgaaaaaggcccttctcacttctattgtgtgttcctttattgtctgctggttttgaatacagattggaagtgtcagaaaagacttcaacaatccagcccactgattgtacaggagcagaaatgaccagatcggccgggcacagtggctcacacctgtaatcccagcactttgggaggccgaggccggtggatcacctgaggtctggagtttgacatcagctgattaacatggtgaaaccccatctctactaaaaatataaaaaattggttgggcatggtggcacatgcctgtaatcccagctattcgggaggctgaggcaggagaattacttgaacctgggaggcagaggttgcagtgagccaagatcgcaccattgcactacaacttgggcaaaaagagcaaaactcccatctcaaaaaaataaaataaaataaaataaaataaaatacaataaaataaaatacaataaaataactgcaaattagcctgcaagaaaaggtgttattattgagaagcaattctccatgggtctgtcatttgtccgctcatctctgagggagacaccaacttgttctgacccatcttttcaaggaagttttagagcaaatgaccttgaaagtagagaagatagggccgggcgtggtggctcacacctgtacaatcccaacactttgggaggccaaggtgggcagatcacgaggtcaggagattgagaccatcctggctaacatggtgaaaccccgtctctactaaaaatacaaaaaagtagccgggcgtggtggcgggcgccttgtggtcccagctacttgggaggctgaggcaggagaatggcgtgaacccgggaggtggagcttgcaatgagccaagatcgtgccactgcgctccagcctgggcgacagaaaagactctgtcttaaaaaaaaaaaaaaaaaaaaaaaccaaaaaaacagaaagtagagaagataatgtttctctccagatcaaaaggcagatttgcttattatgcagtataataaagacaatgtttcccttcaggatgaaaagatgacttgcttagaactacttaaagaagatttgagtttcctaagttcagagttctcatttgtgatgcaaaaccactgcacctgtagaatctgacttagcctatctacttcaaccctgagagagacgtgtggaggggaactggtgtaatatgatgctcatgcttctttctccctgtgctctgagttctgcagtcctttgtctctgatccaggagtctcttgtcttctgtcagcttttatgatactgcagcaaactaacttgctaacttgcaagctgggtaaaatcccacattcttcacagttcttgccagttattctagtactacaacaaaaacattctttcataaaaattggtggagaaagcactgaaatttactgttgaggcatacatatttaatatagggttggcaatgtgagttttagttttatcaacactatatgtgttactagaatttttcaactatctgtaatttcttaaaccattatctataaacacctacccccaataaaaaggcttttatctggctgaattttatctggtgttagaacaatttgtgatttgttagctgaatgtccactgcagctttctgtaagctaagaaaaaacgtaagtgctttctatctatttatctgtatatgaaatactttttcaatagtcctgccaactcagctgttttggaggaattactttatgttttgaaagaggatttttttcatgtctgcaaaaaccagtcgtagctagctcagcgtatttcataagggtcagtcatgtccttcagacttttcgttttggtgttcagacattgttttaaatctctttctcaatacccttgagctggccattgaaggatttgtcacatttcaaaagattgagtaaaaggaatgggatcctatgttcaggaaaacaaaacataaccaaacaaaaacatcagccagcatgatttccatgctgctgtggggaaggtcctggactcatgggcaggactccacaggcatgcctgagcctgggcccatcacacacactggacatcctgtccactccagcaagactccacacacatgcctccatgggctgaggactgcaggtgtgaggaccggctgatattccactgccccagataggataggtttagttaactaaattataccacctgggattggtgagacttgtagtgaagaatagcctgggttccaaatccctggctttgggatactctcatcaaaatggcacactcagccaggcacagtggctcacacctgtaatcccagcactttgggaggccgaggcaggtggatcacttgaggtcaggagttcaagactagcctggccaacacggtgaaaccccatctctacaaaaatacaaaaattagcctggcatgatggcgggtgcctgtaatcccagctactcgggaagccaaggagggagaatcacttgaacctgggaggcggaggttgcagtgagccaagactgcactaatgcattccagcctaggcgatagagtgagactctgtctcaaaaaaaaagtaaaatggcacactccagatttttgagagtcacatattttacgtaagatgtagcattattttcagacacggtaagcgacctgccacagcagcggtcttgcgagagagtaactagagtttactcactttgcctctgacattggtggagctcaggtttcccaagtgtgggcccctgagcggtaggaacaacatcacctggcaagttgttagaaatgcgaatcttgatgccatcccagaaatcacaaaaatcccagggtgggttcagcgatctctggtttagcaagtccgtgccccctcccacccgagtgattctgatgcacactacagcttcagaccaagggctgttgctcatggtgtcacatgtcagaggaggatgaggttagtaaattataaacaggaaaagaagaaatcaaatgttgctgtcaaacgtataaggggataacatatagcatttattaaataaatgataaataacattgattaaatagcgttgattaatctattgtttttcacttaagaagtatatgtcaggctgggcatattacaggctcacacctgtaatcccagcactttgggaggccaaggcaggcagatcacgaggtcaggagatcaggaccatcctgactaaaatggtgaaaccccgtctctactaatacgaaaaattggccaggcgtggtggcgggcacctgtagtcccagctactcgggaggctgaggcaggagaatggcgtgagcccaggaggcagagtttgcagtgagctgagatcgcgccactgcactccagcctggaaggcagagactccgtctcaaaaaaaaaaaaaaaaaaaaaagaagtatatgtcatgcctatcctaatgtcagtcactgttagaatacaaatatgaataaagcattctacaaatgtctcatcatggcctgcagggaaaaatccaacttgccacatattttgtaaataaggttttgttaggacacagccacacccattcatttgcatactgcttatggctgtttttagctacaaggccaagttgagaagtgtgacaaagaccatataccctacaaaaccaaaagcacttaatgcgtaatatctggcactttacatcaaagtttgtcaataccagatcaagtgttttaagggaaaatccttcccacatttcaggtagttaaacgcaagtggaattaggagtatgtgtggtatgcaggggttattctgtcatccagtaaaatatatgtattttttttttcagtagcaaaaaatttagcttcacagatgttagtatcatggaaggcatgcagactgtgggacaagaagtaaagcaattgctggccaaacgccttggtgtgtgagtgaacagaaggagagtgagaacaaatacagaagttagaacagaaaaaagtgaagaaaaaacgtggttgagaagggagaatattatcaatcaaaagaacgtgacctatgtgaaaagctaaaatgagggagtatgtggcaggacctggctggggaaaggaactaagaagcagcaagatactggattggagcattccagttgcctggcacagagggtgggcggcagagtcttcgcaggaatgctggggtgttgatgccaggcagaaaaggggcagactccagatggggctgggagagccatgctctgctaaactctcggctggaatttagtggggtgatctcagctcattgcaacctcaagtgattctcctgcctcagccgggctcaagcgatttcctgcctcagcctctcgagtagctaggattacagtcatgtgccgtcatgcccggctaatttttgtatttttagtagagatggggtttcgccacattggccaggctggtctcgaactcctgaccccaggtgatccgcccgcctcaacctcccaaagtgctgggattacaggcgcgagccaacgcgccgggcctctgctgcacttctgtgtctaccaggagtccatgtgtacttgtgtggctatttacagtagggctctctcaattcctgactccgctaaatgactaaccatgtagtgatactggagaaaaagcactggatttccctgcggggagcttgggttacttcttggcttcacctcttactgtttgacccgtgggcacctcatttcatggcttcacgtctccctttcctcattagtgagaggcttcctcccacctccacatcgtgtgattcttctagactcacttattatcatcgaggggcatggcttaaagaaggtcacagcgtatttctccagctccctcgcttaaagagcaaaagaatagcagagactcagggcccttctaaaacagaattgttgaccactttggcacaaggtcatccgttcctgggaaaggtttgatgctgatttatttccatctcacacctcgtaacagatttcttctcttgtccaaagagattgtttactgtggaaacatttagaggaaaaatgagcagccgggatccatgtgtgtgatcatatttatctttctttcaggaatttttctttaaatgtggagcacaccccacctctgacaaggaaacatcagtagctttgcacctgatcgcaacaaatagtcggaacatcacttgcattacgtgcacagacgtcaggtaaggatctaaaaatagtgtcacttccctccacggacgtgaggtaaggatctaaaaatagcatcactcccccctccttactttcccaatattgttctgccacacgagccttcctcagtgaactctctttcctggggagtgtctgctttattttgatgcgtctgcccaatttgggtatattttaatgtgaggaaacaatttaaaatgccagtgacttagtttaagtaggtaaatagggtcctaagatgggagatggcatatctaaaatagtgtatgtaatcttagttgatattaaaatataagctcacatatttgagtataaaatgtaaactcatccattaagttccaaaataaaattaaaatatggtgctaacatttaaaatgttaacattaggcatgtgccaccacacccagctaattttttgtatttgtagtagagacagggtttccccatgttggccaggctggtcttgaactcctgacctcaggtgatctgcccacctcagcctcccaaagtgctgggattacaggcgtgagccactgcacccggccaggaatggaaaaaaaatttatgaacaccacaacatgtagcccatacattttatttttaaaatgtcttttccatacatttcagttctccatatttgcctatatttatgctgaggcttcgcacacattcatgcactcaaaatgaaagcaagtagctagtttgggaccttgttatttctaatcccagtgaacacaagaaaagcaagcaaatgtggagatggcctgttagtaaaaaaagggaaaacgactcaatacgaattgcggtgtaggagccaaggacaaagtggaagaaactgagtctgtttgctctgcagagtaggcaattcagagtacaattccttactctacactttccgaatggacagagaaaagaaattagcttcgttacatgttctttgaagttggctaagaagctcaaattgcaatagtgagaacttagccctcatatcaggaagaactcttttttttttttttttttgagaaggagtttcgctcttgttgctcaggctggagtgcaatggcgggatctcggctcactgcaacctccgcctcccaggttcaagggattctcctgcctcagcctcccgagtagctgggattacaggcatgcgccaccacaccaggcttattttgtatttttagtagagacgggggtttcttcatattggtcaggctggtctcgaactcctgacctcaggtgatccgcccgccttagccccaccaagtgctgggattacaggcgtgagctgccgcacccagcccagaaagaactttttaatgaaatgccaaaatgaattaatgaataaagtcaaagaatctattgtttcagacttttaagcaaaaatagtcatataccctaatcattttaagtgttgtctctctctggcttttggaactgtattagatggtcttttaaagttgctttaaactctgtgatttcgtgataagcaaatattcacactcctatcaggctatttctattctctaataaattaaaattaaaatgttgattaatagaagcccaaaaaccttaacagcatctgttgaacaaacctgtttccaagaaggaataaaaatgagacgtgattttctctttgctgcatgtttagtcactgctgtggcaggaagcaccacaacattgcctttaaaatatagcgcttcagcctctcttggcaaggtgaatgactgtgtatggctaacgctttcaacatgcaagaagaacagctaagatggggattctggtgtttcgggaaagggattgaaaagtgctaaaagcgagggcttgactgcgctgatagcagcaggtaatttaagtcactgttcagtttttcaaaggaaaaattcaaaatactcttctgtaagtcagaaaacagctcatcagccagtattttaaactttccattaaggttggtaaacatgacattaaaatatgtggtgatgatggtattatcttactaagagcgttgccctccccgtttcctgctgttatgctgtcactttcgtattaataactggcaacatctttcgaagagaatgagccacttacttcccagatacacagggtgataattgctggaaaaataatattgtcacattaattttgttcatatgattgcctttgggagaatttataaatagaagcgactatatccagatgcatcttaagggtgtgtgtatataaccaaccacttgattgaataaggtcccttctcgtgtaaggcagccaagtgccccatatgtaagaaagagagaagaactctttcttctgacttcgagggatccacgtgtaaggacattatgagcgcctgcacggacactccgtgcagtttggtgatcattgtggggtttttcctgataatgctttctttttaaatttagaaataattcacaataaactataaaaagcattagaagtggccagacacggtggctcacgcctgtaatcccaccactttgggaggccgaggcaggtggatcacctgaggtcagaagttcgagaccagcctggccaacatggtgaaaccctgtttctactaaaaatagaaaaattagccaggcgtagtggcacatgcctgtagtcccagctactcgggaggctgaggcaaaagaatcactcgaatccgggaggtggaggttgcagtgagccaagattgtaccactgcgctccagccagggtgacaatagtgaaactccgtctcaagaaaaaaaaaaagtgttagaagttatttttaccctcatgcttagtaaaatttctggttaatttttttgcaatatcttgattatgcctatttgcagtgtgtgtgtgctgtataattatattgtgtgtgtatgtatatatatatatatatatatagtttcgtatcatgctttttccatttagcaggacattatgataaattttctctgtgccaggcatgcacgtggcagctcatgcctgtaatcccagaactttgggaggccaggcaggcagattgcttgagctcaggagttcaagaccagcctgggcaacatggcaagaccctgtccctacaaaaaatataaaaattagccaggcatgatggcatgcacctgtagtcccagctacctgggaggctgaggcaggagaacggcttgagcctgggaggtcaaggctgcattgagctgtttgtgccactgcactccagcctgggtgacaaagtgagaccctgtctcaaaaaaataaaaaatgaaaatcataataaattttctctgccatgaaaacagttttttaaaaataggtacctaaaattccgttatgtggggatatgctgttgtaggactttctccttagttcagctaaaaacagagtccttgtcacacaaccatgaaaaattaggcccgcagactctttgaagggtgagaaaaatggaatttattgggcaaaaaggaaaagaaaaagggtaacagggactctcagcaaagcaagatgaatatagatgaaaatctataaggcaaaatgaatatggattaaaataatagatgaaaatcagagtatagtattaatttatctgtaaatatagtttctgtgaactccttatcatactggaaaataaaagtaaaatattaagcctccaactgactgaacagactccctcctggtcagggggaccgtggagacaccttggaagctgagttccagccatgatggggtgagaggtcagacaggcctgttatgccaacgccctcactaaccacctctaggtttcctttcctaagggctaaacagaaaccaggcaggttttcccacctcaccagctgaaatcccaggtactacccagatcaggagaggccaggctcctccccaccccaaacagcatgaacttcccaaggctccatccctttctcccagtgcacaggctggtcactttctccgggtacccccttgggtaccttggctgtctcagttctatttaaccatttccccacttttgagcatttactcacagttaaaaaaaaaaaaaaaaaacaaataagactgaaaaccatattattttacagacatcattgactgcatgccttggctctaagaatacggtcataacagtgattgcaggtccacggtaatggacatttttgaggttcttgatccatattgtcaccttcctttccagaaacactgctctagttctgatctggcttcccatgtttgagagggctccctcctgcctctctttcagcataatttttgtctttgcctatttgataaaggagattttttattattttgttatttatgaatacaagaatttctcactggcttatttgcatttttattgtgagagaacaatgtgaaactttctccatatgaaagctatacaaaaagtctacaaaacagatctggtttcagcaattgctttctcattcactattcataatatcacggtgtcctttataaatatacagtttactgtcttttgaatttatgtttaaatatgttgctttggtctttattttaaaatattatattttcctggagataaatcaaattcataattacagacttaaaaataaaagggtgttttaaatctattttttattcttataattgttttacttatgtgtatatatatgtattaatcatacatcattaatcaaattagacataattaaccacataatagatgaaaatcggaggatagtattaatttatctgtaaatatagtttctgcgtactccttatactgagaaataaaaataaaattgtaagcctccaactgactgaacagaatccctccttgtcaaggggaccgtggagacaccttggaagctgagttccagccatgatggggtgggaggtcagacaggcctgtcatgtccccaccctcactaaccacctctaggcttccttccctaagggctaaacagaaaccaggccttcgaaaagactctacactgaggctgggcatggtgagtcacgcctgtaatcccagcactttgggaggctgaggtgtgcagatcacttgaggccaggagtttgagagcagccatggccaacatggggaaatcccatctctactaataatacaaaaaaaaaaaaaaaaaaaaaattagccaggcatggtggcgcgcgcctgtaatcccagctactcgggaggctgaggcaggataatcgcttgaacccgggaggcggaagttgcactgaggcgtgatcacaccactgcactccagcctgggtgacagagtgaaactgtgtctcaaaagaaaaaaaaggccccacactgataatgtccatcactggcttatatcttcccaggtacagaataaaggcaagataagataaatcagtccttcaccctccctgagacagctgtttcctctattctgattttctttaaatgttcaccttatcttatgtaaaatgtaggtttactgggcactatctaaaggctcacaagtatataatcatcacaagtatgtctcattgcctcccccttttaaggaaaatgcataaatgctaaatctcctgagaacctcttagggaaaaagcagccacaaaggtagctgtgacttgggtttttcccaggcatgctctcaagctggaataatagaccttgatgacggagccttctgcctcagtcactcatttcggttgtcagtactaatgaaagtaagaattttatgtttttgtgctttacaaatatacttctatatagtaagagactgataactctttcatttacctttttaataataattcaagtgctctaatgccacaaagctaactttttgaccttaagagaataccacaatttctttggcctttggtttccgtgtaaaatccaggattttaagtaggtcatctccaaggctctgactggttctaaggactgcaggagggaggaataagacttcttcatagcttataaattgattgagacagttgcaaaaatacttgtatttagttctgtctgttgacaaatgcagaaatcaaagatgaagtctgcaatgatgcgcctaccaaatcacatatatgttgtaacatgtaggccgatgtataagagacatgtgtgactcatggccagattttaggtttacagtttaattcaggtacatgatttgtgtcctttgagtttacatttgacataaaatattttactctttcttaggccgggcgcagtggctcacgcctgtaatcccagcaccttgggaggctgaggtgggcagatcacgaggtcaggagttcgagaccagcctggccaacatagtgaaaccccatctctactaaaaatacaaaaattagctgggagtggtggtgtgcacctgtagtcccacctacttgggaggctgaggcaggagaatcgcttgaatccaggaggcagaggttgtggtgagccaagatcgtgccactgcactctagcctgggcaacaaagcgagactccgtctcaaaacaaacaaacaaacaaacaaaatattttactctttcttaagggaaaaagtgaactatctgggaaccagaatgtcctgaggttttttgtgaagctgcaggttcccttctggccatcaagccttgtgttctcctctccttaccaacagtagtgacttgctcttcacccttcagggttgtcagttgatagtttgaggtttatgaatataagcataacaagctgaacaaaaagcaagaactggattaagcacagtaagtctagcacttgaaggcaaaatagctgccttgtttagtctttccaatagaagttacaacagaaggttcaggacttttttgggtgcctaagtcatataaaaatggcacaggtaagccaaagggataccggaattctttccctagccagcatgtgtgtcttggggctcaccctctgtcagtgtctcccaaacgaaattgatatttctgctccttcaatctccctttacagtgccagttttctaaattttttaaagggtaaaaattgaaaacatacaaaatagaaaaatccttatcaagatattgaggactaaactctgattttttttatcatacccaaatttctatctaaggagtctggggagtcatgccctacaattcgtatattctcatcagataggttttatttaaccctatttattgtgactactttccaaactgacttcgggataacattatgagacaaggaagaaaaacaaaatattttagcccaaaacatgtttctttgctgtatcttgaaatggccctacaaagctgtcctttgtgggggaaaatttgcatctgtttatagctagctagatatttttctatctagataacatagctagatatttttcttccaggccctcccaatcctaaagagattaactaaaaatctagcactttttaaagatctgaataggagacatttgtcctctattgtctctaagggtagccattataagacctcagaagaaccttggtctccacagtcttttgtcttaacctgaacattccctttctatccctcccaggtctttagacaaactcaaccaaatgtcaaccagggaagtgtttaaatttacctataggctggaagcccccagctttgagttgtcccacctttctcgaccaaactaatgtatttcttaaatgtgtttgattgatgtctcatgcctccttaacatgtataaaaccaagctgtgccccagccaccttgggtatgttctcaggacctcctgagggctgtgtcatggaccattgtcactcatatttggctcaaaataaatctctttaaatattttacagagtttgactcttttcatcgatagaaggcagctagtgaatctctgtatgttatctcacctttaatcattattccttagtttccaaagctgaagcagaccgaaaaatagcccgatttgcttagtcggaaattaaccttcgagacacatgtttgaaaacccaggtccctgttgggcattaaatttaaaaatctgttctaccatgttatttccctcaacccttccaataaagacttatgtttttgatgtcattgttgtttgatataaatggtttcataattgccttcaaatttgtcctaaaataaaattcattcggcttattgaagcaatgccacaatggattgcagacttaaaagatttacttgggcctggggattagcaaagatttatctcaaagtccatttgtactttctccaggtgttcctgggggagaatgacttaaagataatttgactggattttggtatgctttcattcattcattgaacaaagagagatagggaatggagatcttagttacaattccctttgaatgcatttgttatgtcttaagcttcttttgtcaattcacatattaattctggctatagctggcattctgttgtgacttagaattactgtgtaagttctttgtcagtctgatttttgacattaccaatagctactttccatcaacttaagattttcttaaaatttagggatcagatgggatctgatagtttatccagtcatcagactctgaggagcatggtgagaaactcaggtatacgtacaaaaagttaaactggaatctttaacatagcctttcacagtaagtggttttctttctgtcatggaaattgttggaagatttttatgtgttgtagcaccagtgtttgtgcacacagagctatatatttctcccagtagacccaaatatgtttatattataataaacaagggtatgttctagagtcgaatggaaaatcttacaactttttaagatgaaagagaaaacttcaaagatatatcttctagcttgaagcaggctacttcacactgtgccccaggccccataggagtaaattctatctccttatgccaggagtgattcttttctgaaaagtgtgacacaccctcatctaatccagtcttgagggagagctgctataaacccttccagaaagaatctttgcataaagccttcaataacaggtgatcaccatgctccctttgagattcagatgcagtgcttaatgacctgtaattttttagctacattgatttaaaataattagggcttccatcttataaatgaagaaattgaatctatcacattaaaaaaattacatctgatcacaccacaaggaagtggttaaaccaatctacaaaccaaagtctacatggcttgcattgctattctttcattacaccttaccctccaacctgcatggtcctggctttctctgtacagcgaaaagcaaggctatctggtgaggccggaaggtggatttgcatgtgaaaaggagaatgtagcagtaaagtgagattcagagaaaagaaaaagttgaactcgctgttgtcctgtgtgtctgtctttaaaaaccagtaagagtagaaaaatacagagctgcctccaagtctgctgctctgcaaaattgcaggctgcttgcagggcaagacccaaattgactgacatgccagtgtgactggtcctccctaccgtggccagcacaagactttgcatcaaagaggtttaaataaatgctgacttaaaggaaaatctgtttcatgcagtgcaacaaacagaaagcaaactattttcacatgaaacaatctccttttaaaaatcccttctgaatttaatagactaattgagttaattatttaactcagataaaacaatgaattagtcagaaatcaatggagatttttaaggaggtgttagaaataaggggaaatgtccaattttgaagtccaagtcacaggatatagattatgctgccatattatctggggtcagttacttacgaaagcatagaagaaatattttatccccactggtactttgaaatgtgaaccattcagttttaatgtcagccagtgaccttcatttctcccgtggtgaacctgtgggcttcagatgtgagcagctgcgtcagcagagcttcctagagatgtcacaggtgcttgtgcatgaaattcttatgccttaccttttcatttaactgtcaccgcaggtgcgcagcaacccccgctgggaagagcagggcaatattgcaaatcctggaccaattttgtatccgttagggtcaaccttgcgtgttgtaactgtctggatcttaagcacttcattttctgttggtgggtgttttttgtttgtttgtttgtttgtttttgttttgagacagagtttggaatttcgctcttgtcacccaggctggggtgcaatggctcaatcttggctcactgcaacttccgcctcctgggttcaagcgattctcctgcctcagcctcctgagtagctgggattaaaggcatatgccaccatgcccactaagtttatatttttagtagagacggggtttcgccatgttggccagtcttgtctcgaactcctgacctcaggtgatccaccggcctcagcctcccaaattgctgggattacaggtgtgagccaccatgcctggcctgttggtggatattaagaaagatggagcggccgggtgaggtggctcatgcctgtaatcccagcactttgggaggccgaagcaggtggatcacgaggtcaggagttcaagaccagcctgacaaacatggcaaacccccgtctctactaaaaatacaaaaattagccaggcatggtggtgtgcacctgtaatcccagctactcaggaggctgagttaggagaatcacttgaacctgggaggtggaggttgcagtgagccgagattgtgccactgccagcctggatgacagagcgagactccgtctcaaaaaaaaaaaaaaaaaaggtgctacattcctgaagcatctaagagacccttgctagaactttgttaacagttaagctttgtgtttaaggtccattttcatctgaaagaaatacccacagtgtttaaataacttttttttttaaagaaaactattgcattacttgtgcatttatttctaatggcaattttatccttataattagcaatttgctataaactaggtgaggggaagaagttacttttcattgcaaataatgtttgtgccagttcatatcttcagatagaaattttaaactgctgggacactttttagtgattagcactaatatgatctaccttgccctctataaacatcctttatgtagctctattttctcatgacatttagaattaagtatttgcaaagttgtcctttgtagctttcaaagcctgtagagctatttgtgacaaaataagcaatagtttcagacacccggagtgcaaattcatttatcgcagcaagggccgtggtgtgttcattctgttccttgtgaatttgacacattctgcatcacaggaaacatgacctcatgtgctgtatcttctgtgcaccggaagtggaatttcaagagtttctagatctcgatgtggattttcacaacactgagaggcactgggctacacagatataccagcattctattatatcagtatcacaggcaacgcagtctcatgcaggcatttgagatctttaatacctcttctaccatcaaagataaggtaaaaggagattagtctgttcattcaacagatatttactgagttcatccgtggctcaagaaactattccaggtgcttcaagctgagataaaaccttgcgtttctgatcaagcctgatgcatttctgtcgatggcagggaaagccgtcgacggggacactctctagcaggtgaaggtgtgacggaaccgggctagttcaagcaaggcagaaggtgtgaacacctcttgttcattttcactgtatcgtggtagaacagggacccaaactttatttctttaggctaagttttccccaagattcttttataatacttggccaagacagaactttgaagaaatacatagaatcatttgctatgtgtttgagcagagcatgcaccagttttcccactcccttttcttttacacccaaccggctagatacgtacattacctgcctaaccccaagccatcccacgtagcttccgtttctgctgaagtacctcctccttgcatattaccctggaaatgaccagaccgtgaccacaaagtcaaacttgaacacctgttgctatcattgcaggtctccacattagattccttctctgagccggaacaaaagtgactttgtggtgttccagactgcacaggactgttttcttgtgcgctcagtccagacacatgtgtacgtcaggataatgtgacatcagtatatattccacaaggctggagaaggtccaactattgctaacaagttgttcttaccatttgttagatattttgcatgtatgtttatcttaacattttgaatgttatttatacccattttacagtgccacagccactggggttcaggagaggtagcataggtaatagtgattagggttacacacaaatataacacatattcctgcattggtgtctatattcattagtgaaaattctgtgacaaagtgaattctccttccctttgttcctaaactgcaattggaaaagcaagctgtctaccatgtaggtgaggagttggtattgctgttcttaaatccacagactgactttcatttcttgttctaacaaagcaagacagattgactttctgtccccagcaagctgcagtcctacatcattgcagcactgacccttttgctaatagtaactaatcgtcactccacatcaccttcccagtttgcttaaaacccatctctttcaaatggcctcgtctggtgaaggctcttctgatttgcattattcttataaatatggaagtatacatagaccattaatccaagagttatttatagacatgtgtgactatgtaggtgatcttaaatcatcccctgaattcttaaattcttatcgcgtgatttatccccaacagctaaagaagtttctgcttctgccttccctttcattttcattctttactcactgctaagatttggatgtcttttgcgtttgtctccagccgtctttccaattcccaagatacacatgaagcacagtggttcagagccctgcctttgaagccagactgtgtgtacagaacctggctctgccatcttttgcctctgtccttctagataataagagcatcttcttgttcttgcagttattgtaaggatgaagtgagtccatgcagtaagcacttggaaccatgttttttttccagtgtggtggcaccaaagcggggagccaagttagcacagccctccctttccatttcagcttcaaatggcaacatccaagttacagattctgaagccctggagtttaggatcatataccccaatcccccagggagcacattctactttgcagaaggtctgtaggtgtgcaggttgtaacacagaaagcagatgactccaggatggaggtcataagaacagctttccctcctgaacccaccaccgatttcattgtctgactgggggcagatcaatcactgtgactttaatttcctaaatttggttaattcctgaggtggtggtaggatcaaataagttaatttctgtgaacacactttgaaaattttagatctgtacacaaatctaaatcacttatgattattaataatcctgttctcgggaaatatatgtcataaatagttatttttagaaacgaggcatttattcatttgggagtatctaaccctgagtatcacctcagaggaaatattttgagttaggagggaccatgttgctacaagcaaatatattttaatattaatgggaggaatagtgtggacacgtaattgtataagaagtagttttggaagaaattgggcattggtgacagaaaagtatttgggaaagataagacttctctaaaaggattgctttggaaatgttagtagagtttaacctcttatatgtggctgctgcagaggctgtggcaggagactgttatgggcggacttctccagaggcagaaattgaggcagaagttggtgtgagtttatcttatccgtcggaaccgaggcctgcaaagggaaaaccgctagatccccagctcgctcagcctctcggtgcggctgccagggacaggtgccgatgctgacagcagaggccatccctggccacacgcctcacatctgagcagcaaatacttatttgaaacgggatctgggtggtacttctctctgtatcttctacagcccttgggcaacaggcaggagaataaccagtgaatcctgcgaaaagttgtttaggacagtattagaagagaaagtgtacagtgtgtattttttggacaagaaataacaaaaataacaatatttaacttattccagtgactgctgtaatgcaaagggaactgataccacttagtggaataatacatgttttgaaagcaaaaaacagtcagattcaactatgttaactatattataaactaaccactctcacattcttttcttttttctctctcatttttttttttttgagatggagtttcactcttgttgcccagttcagaggtcaatggcatgatctcagctcactgcaacctccacctcctgggtgcaagcaattcttctgcctcagcctcccaagtagctgggattacagatacccaccaccacgcccagctaattttttgtatttttagtagagatggggttttgccatgttggccaggctggtctgaaactcctgacctcaggtgatccacctgtcttggcctcccaaattgctgagattacaggtgtgagccactgcacctggcccactctcacattcttacataaaattcaggtatcatattacaatgaaaacaactgcaaagaaaaaacagagttttaattattattattattttttacaaataccataatattgatttgatgtagaaattactttaaatttctctcattatatctgatataaatgattcccttaaaaatagcaacaacataaaacattcaaatagtcaaaatgtatcttaaagaaaagttagggaataaacttcaaaatttagtttcctactgaatcttcatatggtttcccaggcataagaagagaggaacaatttagcgtgtcttttaagaaatacaattattgcgctaaaaatttaaccacagtacaaataaacaacgtcactgataaattacccaagtattataataagtttttaaaataaatgcaagcgtctttatctctttgtgcattttaaccatatagagacatgacatccaatattagcatcctaagcttaatgcaattcagtaagcttctgggatgtggaattgcattttgttgtcaactagactttcttaacttgaatctgtttttatgcccctttttaaagggtattacatttatttaatgattatttctaagattaatctgaaatgatttctgtgattagcactcattgactaggttttaaagtactcctctacaagagagatggttaaattgatccgcgtagttaatgaaagccttgacctgcacgggaggacttcaggagactcctcaggacctgccccctgagcgcaagccctctgctttctttgctggtggtctggagtggtgtctagcgatactgtcagaaacatggcatggtggaacagaaagcaaacaaaatcaagagaagacatgggctgggcgcggtgactcacgcctgtaatcccagcattttgggaggccgaggcgggtggatcacaaggtcaggagattgagaccatcttggccaacatggtgaaacctcgtctctactaaaaatacagaaattagctgagcgtggtggcgcacacttgtaatcccagctactagggaggctgaggcaggaggatcgcttgaacgcaggaggtggaggttgcagttagccaacattgtgccactgcacttcagcctgatgacagagtgagactctggctcaaaaaaacaaacaaacaaacaaacaaaaaaaaaacaacaagaacaacaaaaaaataaaaacagacatggatttgcatctgcagttgattgcttgccatataaacttgaactagtcatttacccttaccctcagctacctctctgtcatatgatgttgatggtacctacttaaaaggagtatcaaggttgtggtgatagttcagaaacaacattcacgtgacagtgcttaggaaactgtcaaatgtcattcagatgttattatcaatgaacagtttcccctggaattgctgctccctctcagatcctctcctactgcaagactttacacgtatgacagtaaggaaggtgccatctcactccattctgtattgggcagctggctgcagacttgagtgatgatggctggtcttccagcgggtgtctgaagactcggaggttcccatgaccacagagtccagtacacctgcacacgtgtacaggatgcacaaagaaaatgaccaggaatgccggtgacaacactaagttgaaattttccaagaaagtggcctttcaaatcactaatagctacagtaattatattatatataactctattacagaatttatatagaacagtatcctaggaaaatgctaaaatgcacgaaataggatgactccatcacacacattggtttttacataggtgtcactgttcaactctaatctggttttctggaattatatatataattgcatatatatgtatatgtttttgcaactcctagtccatatggagagagattttaattcaggaaattaaagaataaatttcagaacatttattgttgtatcccttactaaattatagatggatggaactatccttttatcttgaaaatttggcttaattgagagagtttatttttccataaatacagtggaatgctttcctgagagagcactgtactctctcacttgcttcttgtccatttgtgctattttatgccatactgattttgcactgagactggcagaaggcacagacttttctctcctcccccagtttctcaccatatctgattttcttgttttccagtcttcatttccatttgtttctgagcatagattgatttgcccttgaatggctcagtggtgctcaaggacacccgctgagttagcctttggtgaacattttccatggaacaggctggaatcaagagcacaggccctggagaaagaatgttgtgttcaaaacccagttctacctctagttgtcttgtttcctgggcaagttccccagtctctcaacttcttcaaaaggttgtgaaaattacaagagataaaacttgaacagtgctgatcacatatggacagtaaatattagccaagattttggccctgacttgctaactgaaagggggatattgtaggtaagtctttacttgaaccaacaggtcttgacttatctgtactttgttctccaaacttaccacagccatggttctatgaagcataatgaaagagtatataatctttactgtgactggcacgcatgctttcacatcccagatatcatctgtccaaggaaattttatttatttatttttattttttgagatagagtttagctctttttgcccaggctggagtgcaatggtgtgatcttggctcactgcaacctccacctctccagttcaagcgattctcctgcctcagcctcccaagtagctgggattacaggcattcgccaccatgcctggctaattttgtatttttagtagagacagggtttcaccatattcatcaggctggtctcaaactcctgacctcaggtgatccgcccacctcggtctcccaaagtgcagggatcacaggcgtgagccactgtgcccggcctccaaggaaattttaatacaaacccttctttggcgagttgaattgaaattttttttcctatgaaaacaataatgtttttaaggccaattatgtaatttttatgaatataattatgataatgtaaaatttagtaaatattctctgtaactctgttttcttttttgataatatgacatgaggcaagaatctagatataataatacccttaaatagctgtaagttagtggctttcatccggggtagttttttcccaatggggacctttggcaatgtctggagacattttatttgtcaccaatgaagggtggtgctcctggcatccggtgtgttgatgccagggctgctgttgagcatcttacaaagcacgagtcagccccacagcaaagggttatcttgcccaactttcaatgatgctgaggtcaggaaagcctgctctaggtggaagaagaggtggggctgacccaggaatgattttgtgagacaggacgatgacttcctccgagactgcttaaaccatgtacattccaaactctcctgttcctctccattgtttcatggtctgaagagaaatacatttagttccaaatttaagattgtgcatgtgaactcctggcctttcacattgagccatggggctggctcttttccattggattttgataaaggaaggaagaaaaactggctgagccaatactggaaaacatgcttcatggtaaacaggcagtgattaggaggcctgcactgtgaaggagaggctgagtctggttgtacagagataaagcaattctgaaagtcattttccagaaccaacaaactgtaatttagttctgtattttaaataaattccaaaaacctcgatcaggtttaataggtgtcaccctttgactgtataatgttagctggtttttcttgccttacagtggaaatgaatacttaatttcaggaagaatggaaacaagtttgcagttccttaataaaacaattacaagagtcatctaattttattctgaaaaatcctccattatgtgtcaatatgatttcagaaatattgcagaatttttaatgctatttggtaattttaagttgagagaattattcccacagaaagcaaggcgaatggagtggaaaaaaggtcaggccaaagagaaccttactaaaagcatctggctgtacttcgaattctgtctcactgtggcggcatcagtgatgtggcatacagagcttctgtggtattagaacattcttggctaaacctcagtcttgccaggattataatgagtttccagtctttagtggaactgatgaagaagatactgctcagcgctgcagcacattcacagaagccatatgcctctaagtgcttcgcttcgatgtattatagaagctacgtttcagctacacggctgagattcctatcaaccaagtcgcatctgctggaagccttacccaactgtgaaaaatctcttcctgcccaaacttagtgcgtgctaactgtgtttacatgcagggcctccttaaatgctcagaataacattgggaggtagatactattagtgtcccagtcctcacgtaagtcaccaagacttatgtgggaagaggcttggaatgtaattcaatgtcacatagtcaataagttacagtagggtctcaagcccaggttttgtactaaagtgtgtattcctaggtgcgccccattctgcctcagtaccactgattataagtaggaaagggcttattcatggatctgaaattcagggtgcgtcgtgctagctcacacctgtcttgtaactctgatgcccagtcttcctgctgatgtgttcggaatgtacatgtgtgtgtagaatgctgtagtgatgagaccctgtcacacatgctgccctctgacttgtgtgtgtcacttgtttctacctatcctatctgggcacctctttgcagcagtacctgcagggctggcatccggcaggtgttcagggacgtggttgtgctgctagctgttgggccatttgctggctagctgctcccctgacactgagtgtgatttcccggtaaacctggctgtttgtatttatccttctgtgaattacttcttttgacctgccatccccccaccctaaatttcctattggatatttgtcttaaaaaataaataaataaatttgggccaggcacagtggctcacgcctgtaatcccaacattttgggaggccgaggcaggtggatcacccaggtcaggagttcaaaatcagcctggccatcatggtgaaaccccgtctttattaaaattaaaaaattagctgggcatggtggcacacacctgtggtcctagctacttggcaggccgaggcaggaaaatcacttgaacccgggaggtggaggttgcagtgagctgagatcacaccactgcactccagcgtgggcaacagagcaagactccatctaaataaataaataaataaattcaggagatttcttcagatgtcaggaatgctagcacttttccatatgtttactctgtttagagtgtctttccatatcaattattacatttgtgtgtagtcaatgatcagtggattttggtttctctgctcacgtgggcatgtcttggcccctcttgggctattaacttgattgactcacgtcgtcatcctacttttaccctttcattgttttatacatgtgattctttgatcctcctgattacctcaattgaggaatgctaaaaagatccaacttttattattatttattatgttgattattctaataccatttagcaaatcatctaatacctcactaattggaaaggttttataagctgagatcacacataaatatctgtctctcttgggttctcccctccaggcttttacttctgttccattgctcattctgtgccaggcacatagttttactactgtaattttatttatgttatgtatgtatttattttttgagatggagtctcactgtcacccagtcttgagtataatgatgcaatctcagctcactgcagcctctgcctcctgggtgcaggtgatcctcctgcctcagcctcccaactggctgaaaccacagatgtgcgccaccatccccagctaattttttgtatttttggtagagatggggttttgccatgttggccaggctggtctcgaactcctgagctcaaatgatctgcccaccttggcttcccaaagtgctgggattacaggcatgagccacggcgcctggccgactattgtaattttaaataaagtttgaaatatgtttgataaagcctctcttcactgaccatctttttcacaacattttttggctactctgtgatcattcatctttcatgacaaattaagttaattttgtcatgttctgaaaaggacaagcagaacagagggtggcaccctcaatgccccagctcctttccgagggttcaggtaggcattgcctttctgagattaaattgaacgccattttcaatatggcatcaattttaacttagcacaatcaaattttcaacattcttgtcaactgaaggatattgttttaatgttttttaaaaatcctgggattatgggcttgtgtttgtgtttggaagccattggagaggtgccaacatttacatttccttcttcctttcttttttttttttttaagatggagtcttgctctgttgcccaggctggcagtggctcgatcttggctcactgtaatctccgccttctgggttcaagcaattctcctgcctcagcctcccgagcagctgggattacaggggcccgtcaccatgcctagctaaggtaactttttgtatttttagtagaggcggggttttaccacattggccaggctggtctccaactcctgacctcaaatgatctgcccgcctcggcctcccgaagtgctgggataacaggcgtgagccactgtgcccagcctaacatttatatttctccttccagataggaacacaaccaaactaaaccagagaggagtggagtgatctttctttttaaggttttgagcttgtctattccacattacaagcttgctgctcagatctgaccttgattttcctccaaaccagtgacagtgtctgtactttgggacaccctcctgggcaacctgctggagactcttctttcaaagactaatttcctgaatctctggctaaagagagaagaaggttaatagttcagggagcttgtttacaggccattagaaacaattagcacattgctgagattaaaagcacttctccagaatgttggatggcctagaaaggaaacaggacttttagaaacatctatttttagcatctaattaaggcagacttggagttccccagcctgtcttgccatactgtttcgtattttaattatcaagaaatcttaaatttccttcaagctaaattctgcctacagcaacttaaagtaatagtaacgtaaaaaccctactcatgaattcttatgaacaaatattgaaattgccccaaaactttttttagactgattacttaacacccgtacctttcctctttgacatgtaaaaaaaaattataatttattgatgattttctttctttctaaaaagacacgttttgctctagggacatggctcaatgcccctggaatagggcagccattccgattcttgtttcagtgtcttcactctgctgcccttccttctcctgaaactccctcttctagcccttcgcctgaggcttttacaactctcgaagacgcagtacaattttcacgtgttctgtgatgccttctgaaccttcttttatattgaaaccccattgcattttgtgtaaatatttaaatgtttccctcatacctgataaaccagtctgtaggtcccattcatctttcacagtccctacaacgccatacccttagcaagttcacaggccaggaagaatttgctaaattgaattttatcagtgtcccctactgtattttggttttgtaaccatttgttttctttctctttgctattgcaaagagagaaccactttttttgagactgagtctcactctgccgcccaggctggagtgcagtggcgcaatctcggcttcacttaaacatctgcctcccaggttcaagtgagtctcctgcctcagcctcccaagtagctgggatacaggtgcttaccaccacgcctggctaatttttgtattttttgtagagacaggatttcgtcttattggccaggctggtcttgaactcctgacctcaggagatctgcccacctcggcctcccaaagtgctgggattacaggcataagccaccacacccggccaaagatagaaccaatttaacatatggttgggtccattcatgttttctgtgttgtctgctgccatttcacggggatgtccatcagtcaccattccactaatattttgtaaaagcaaaagatagttgcacttcttaaaaccttaatcagagcctgccactgttggcttcttcttacttcacactgcattccagacactggtctttctccagttcattgagcaaaacagcacaggaccttggcacatgctgttttagttacctgtaactgtttcccaatctcccaccttccttttactttgccccatgaggagatgctttgcaaagagtttagctgttagggatagctggtaccaatatctgtaagccactgaccaccagttaaattgagctgacctggacagccaggggcatgcccgctgttctccccagtgccgtgtgctgccctccaaaagctgtggaatcaggaggacagaggcagcaggctgtcttgtggtatcagcagtaggttaccatgcagaggaggtggttagtcatccctggaagaggaatcccatgtgctgaatcacagagagtgctctgtcttggcccatatggggtaggaagtaagctgtagttatatctcagggaagtaaaagtagacaaagaatttgggggatccacttgcagagggcctcctgtgtccttcaaggagttataactctatcacttagtcatcagggagtcattggagtgtttgtttgtttgtttgtttttaagacagagtcttgctctgttgcccaggctggagtgcagtggcgcaaactcggctcaccgcaacctccacctcctgggttcaagggattctcctgccacagcctcccgagtagctgggactacaggcgcctgccacaatgcccggctaatttttgtgtttttagtagagatggggtttcaccatgttggccaggctggtctcgaactctgacctcaggtgatccacccgcctcggcctcccaaagtgctgggattactggcgtgagccaccactcccagcctggagtttttaagtcaggagaacagagtgaccagtttatgctttaggaagatacttctggtggctctgggcagggaacaggacttcatagcgttgtgtggatcatgtcctgcatggaactaccccgctgaagtccaccccaggctctgttcatccagcagcctggagcccacgtgttgatcaggcttccctgcagccctgcagtccacttctcactggtccacttccctccagcctctctgcctccccgtagaaatcagagagctctgcttttgtggaaattctggggcaagttcccaaaaagcttcctgcgactttttatactacatgagaacatgtacggataatggcaggcccatttggtaaatgcacactgactgccagaaggatctgtgttgaaatgccagcttcttgaaagccttactcagatgtgcccttactgacacggctctgtgtctgggtcccctcttgccctccaaacacatgggccttattcccattcctaagcaagttccaaatctttctgtatctcaaggccttcgcatgtctcatggccagagaaattgtctgcattttttcatgcagctgactcctgtccaggtctcaggtctctgtttatctgattttccacagagaacagttccttgtcctgattcttgcagcctgtgacaactctcacctccttctttactcttctttcatgtgtcataatgcaatgtgctagtctacctttatttaggagactgtaggatgaaagtttgttgcctgcctcagtagacttgaactatgttcactgtattcacatctgtatccccagcacttaacaaaagtgagtggcaggaagcaggtaggtattcagtaactatctgctgaataaatgagcaaatgagtccagcaggaagacctaaaatagttggtgagggctgttatagaaattgcatctcaaccgggcgcggtggctcatgcctgtaatcccagcactttgggaggctgaggtgggaggatcacctgaggtcaggagttcaagaccagcctggccaacatggtgaaatcccctctctactaaaaaatacagaaattagtcaggcatgatggcacgtgcctgtaatcccagctacttgggaggctgaggcaggagaagcgcttgaacctgggaggtggaggttgcagtgagccaagatcacaccattgcactccagcctgggcaacagagcaagactctgtctcaaaaaaaagaagaagaagaagaaaagaaagaaattgcatctcaagatacataataagaaaatgcaaaatagatattctcagcctgaaatatgctttcagaggatggcataacagaaggtgcctctggtttggtttcaaactctaatccataaaaaaggtgtacaaggtacatattaggtaatgtcaagtatgtgagagtaagtcaaatatttgttaaagtatattttaaatctatgaaggcagctcatttaaaaaataattctacattaaatcatcttttgatgtgaaaaataccgttttaaaacaacaattatgctacaactctgtttcactgaaaggaactttctttcttgcgaatcaactacagagctctgtttaacacatgaatacaagatgtagttccatgacaggtatcactgtgggactcgggccaggcaggtgtgaaggagggaggtgagtggtctggggaagccgctgcctcctgtagtcacaggcagatacatgaaagtaggaacaattgctgtaaaagatgacagaacacagcctcattgtgaaccatttggaatcaataaagtctgcagatcaagtcagaagaatgaccatttttaagaaaaggcttcaagtatatttcaaatctgattcatgaatcagaacaggcccccaaattaaacaccacagttttgaacttctgctacttttttctttttttctattaagtgaataaaagttcacttttccctcctttaagccaataaaagagataattattctaaattgttctgaatctttctacatctttttatctatggctgtaaaaatatctataaaggtatgtacatgcatatatatatagcttatatattttacatataacacgtataaacatttatacatacatctacacataaacagatgtataagcacttgcagacatcaacatatgtactcaaatttatacatatgtatgcctgtctataaatataagtgcatagatacatagaatattactcttagaaaaatgagatctacagaagtgttcagcaatttgggtatttccccatcttttgcaacgcgctttttacatttaataaaacatcatggacagccttttaaccaaggacccctatggacatacttgatttatcacaacggctgcagagtatacattccattgtactgtaatttatttagctttgctctattagtagacattgagatcgcttactttttttccttctccaaatgttgggattaacagcagtgtacatgtatctttacagccttgccagtatttctaaagaacagatttccaggagtagattttccaagccataaaaataactgaattctaagatcactctgaacagactagtatgttttttggtggatctcagaaggaaaggaaggcattcactgtgaggacaccccttcagcagattcagaataagtcattttctgaatgttttatcagtgtcaccatcaatactctgaaatgcatgcatttgaggattctatggattcaagacagggttagcgctgtctcttttgtattgagagagagagagagagagagagagagagagagagagtgtgtgtgtgtgtgtgtgtgtgtgtgtgatgtgcatgcaatttggtaaagaaccgtatttattttcatctttatttctcctaaagattctaagccaagttatcactttgcctaagagctcttctagggaaataaattaaaaacacatccagaggcataataaataagaaacttcatcttttccagctatttcaggcttccaaagtacgctatttattctaaaaaactgtcctttattgaaatactaagcatattctgctgtctctgagatagacaaaattcctacttgtagttttaggaaaaaattttctactcattctacggtttctactcatttagttaaaaaatatttattaagcatttactaaataaattctaaatactgtaagggataagtataataccaaaaactaggtgtttaccctaaggaagttctcatcaccctaaggaatttatagtaggaataatatatagaaatataaaaaatatttcttcgtccttggcaggacagtgggagatataaaaatagtaaaagaaggctcatccatttcgggagctttaaaatctagggtgtgacacatattgtgagtacaaacatatttctctgctactgcaaaagagggaaactgtcatgtctagcttcaagatggatctgtgagctgaactgaatctcgaagtgcaggtgggattttgaaaggtagggggtagagagaacattatcagtgatggtgaagaatgagcaaagatccagaaacaggcaacaaaccacagtttggtttagctgcaacttggtgtacctgggagagaaatttgagataaaaagaaagataggttactgttaagtcctagaaggctttgaatgcaacataacgagcttatttggcatatagtgggaatggttgaaagcttgggagaaggcagaatgataattttcccaactggggctttaggaagattaatccacttggtgtcattcaaagagacagatatatggaaggaagaaaaccggatagaagaccactgtactcattcaaagaaaacattctgataccacattcattaaatctaggaagcatctttgcttactaaagccatgtgatttacaaatgagcgggccgtattacctggctttgatggtaacccaattttttttctcaccttgccaggacaaacaaaagattgatgtctgcatgtgagcaatagggggcccattatttctgatgcttattttgaaaaacttccaatccggcctcccataactaaggctttctctccatttcagcgtctcatccagcttttttttaaaaaagttatattcagtaggctttaaagtcaatcttgatattttccactgttatggtttaaaaccctaaatagattacactgacaatactgacaaatttaatcttcctcatatataacttgaggataaaaggtcaaaaaggaaacatgtttctctcctctcctacagataaaaatgcaaatagctagtttcctttgaagtttgtaaatacagcatgtattctgtgttcttgtatagcattaagtaggccactgtgatacagtaaaagttaactcttcaaagtctctgcctggctgagaaaaagggctgttttcttctaacatagatttcatgactatgataaaatcaattctgtgacagtgtgttctttgctttataaggagtacaattcctaaagcaactattttggacagattctttcaccttttatttagataataaaataaaagtctcagggatcgccttcttagcagacactgtgcttggcccccagaaagtgatccagacagtctgcaggctcagagactcatcatctaggggaaaggacaataccaggttctgggacttagcacagaagtgggtgggaaggacagagaagggatttggagcccaatgctgaggaaccttcaatggccccaagaaggaggcagaacagaaaaaaaaatggtgatggggcaacaaggcaataagcagcttctatgtattcagcatggggtctgtgccgggccttgcagggaatgtggccctgtttaagacctggagttgaaagagcactacagggtatcctggaaaccctcctccaaacctttgtcaagctatcacattccttaagccccccattgcagagtttcagggacagtatcttgaaattatatcaaaaaacagattatgggcaatacagaacatggtgagagaaggtgagataaagtccaatgataggacttctattttccctgcagccagattcctcaggctgatccctcaggctggtccctcaggctgattcctcaggctgatccctcaggctggtccctcaggctgatccctcaggctgatccctcaggctggtccctcaggctgattcctcaggctgatccctcaggctgcttcctcaggctccttcctcaggctgcttcctcaggctgcttcctcaaggctgatccctcaggctgcttcctcaggctgcttcctcaaggctgatccctcaggctgcatcctcaggccaatccctcaggctgcttcctcaggctgcttcctcaggctgatccctcaggctgatccttcaggctgattcctcaggctgcttcctcaaggctgatccctcagggtgtttccttaggctgatccctcaggctgcttcctcaggttgatccctcagggtatttcctcaggctgatccctcaggctgatccctcagggtatttcctcaggctgatgcctcacctgattcctcaaggctgatccctcagggtatttcctcaggctgatccctcaggctgcttccttagaggctgctgggaaaatgcaaatcatatcatttgactttatttcaggatttccacattcacttaccaaaaacttctttaaagcataaaataatcatttgtgaaaatagcattaaactgttatattccttcaaaatatacatactatccacatattacatttcatgtctaaaagatacttactcgtgcatttataaaaaatgaattagataaagttaaaataaatgacaaataatatcattgttctcttctaacccagtgcttggcacagagtgtattgatagcatttgatgaatgacatgaaatagaattttgtggtttgttaattttttttgtcttatttgacagaattattttcagcttcgcgtcaacttcataaagaaggcaagatgttgggaggagaattgtaatatgtctataataggctgatggacagtggatttaatggaaaatcttcaagttcactattgaggttaataagcctaaaatatcttaaaactaaattaagacactttctgccttaagaaggcatctttaaaaaagtttgatatcattttagctgactctagaagtaagtagcagttcttttgcaaaaagtgccatttgcaacccagataagaataaagatttctttcttcactgcatgtgtctttagaagaaaaccatcttccctaatcatcatctttgcaaatgtctattttaaattttttgcctcaaaatatctcctgttggatactccagctattttctctttttgcctactcttaaaggggtatatgctgtattttttattacagatctctgatataatttttttctgtcaaatgttagattgtggttccaaccttaacgtttccaaataaatgatatgaacagtcttctcccatttactctgttgatgtaaaggtgttcatatttcttggtcaaatctcttgagttttttcatttcaggtaggtataatgggagcaatttgcaattccaatgtcatgcactgtatttgaattggaacaaaaggaagtatccaacaacaaaatcttgctgagtggaattattttattttatttatttatttttttgagatggagtctcgctctgtcgcccaagctggaatacaatggcgcgatctcagttcactgcaacctccgcctcctgggttcaagcgattctcctgcctcaacctcccgagtagctggaattacaggcatccaccaccacgcccagctaatttttgtatttttagtaaagacagggtttcaccatgttggccaggctgatctcaaactcctgatctcaggcgatccacctgcctcggcctcccaaagtgctgggattgagagtgagccaccgcgcccagcctgagtggagtaattttaaatgcctttagttccaatgagttgttttggtgagtaaaatgcccagcctttccccagaggcccctgtggttgtaccactgaagtaaaatgttctgcaattttaatgactgccagtgtgctttagtaaatttggtagctcgagggccatatttcaggttgtctgtaatttataggaatgtaaatctttgttttcttctctgttcatgcaagaacccacttatgcttttgggagatattatttttataagcaaaaagttttaactgaaaacttggaccaaaattaaaacacccacctcctgcttcattaataacgtatttctattttaccctaaaattgtacactcacccttttttcacatgatctttcctctatgatccatctctttattatggtctccagcaatatttataaccaggtattgaaacaggaagtttccttgtcctcctcccagggcatgtcatgggggcgtggctcacttctttagtgcccggctgctctaggggagcatacagacagggctgttggagccccacagcagtgtctaggggtgaatgtttacagctcctgaaaccccagtgggcatgtgttacagggtgctcttttagtttagccatctgtagacagcttgtgttagctcaattagacccctgccttatcacaaagacagaggactttctctatcccagggttctggcctttgtgtaccagaagaatcggatcacaagtggccttggagaatgagagtgaggttttattgagtagctctcagcagctgggggagccagaagagagatagttttcacctggagtcgggctgctcagcagcctgggatctcctccaactgcctcagccacactccacatcgttctgccagtcagtggccaacatgctggtggctgttggtgtgttcctgtagacatccagcccccggtgtgttcctctgctgatgtgctcctctcaacgtccagccgcctgtgtctgcctgctaggctctcagggtttttataggcacaggatggggatgtggaaggccagggtggtcttgggaaatgccaacattggggcaggaaaatgaaaataattgtccacacctaggtccctgggcacaggcccaagagtggagccctaggcagggaccatgccctcctctacccagcacttcccttccccaccttccatattggttaaagcgaccatgccattcccttcccagcacttccatatcagtatggcctctttcaattctgtcctgtcagtaataatattctgtgtccaaagcagttagtactgatgaatttcatggtgtgtgcggggagaacctaatgcattaggagaccacaaacaccaagtgaggtttgctattagttccagctctaagaggctgtggtcagcatcacagagactggaaatgggtggtcctgcattgtagattgtgcgcctgcagggagcctgaatgtaccttcttcccttgccacatgccacatagacattctgatttctgaacagtcactttccggctcttctttttcaggatctgaaataatcattaacttatggtcatgaactaagttggattattctcttatcagtgtgtctggaacaaaggagtatagactggctagggatctgaggaatgaaaaatacatatgttatcaagaacctttatgtcctctggttctaaaactctcaaccaatgctcagtgttttttaaataaatgcaaattttctctctggtattttgccccatttttattttgaaaattttcaacttcaagagaagttgagagacatcaacattatatcaacattgagcagccatggaggcaccaccttgctggcaccagccattaacaggtggtctcaatggctctgtcctctttcttttcctttgtgctcatacacaaagacacactttcttttttctttttcttttcttttctttttttttttgctatattttttgaacatgatttgcaaattttgtgatactagacacctcaatacttcagcaagcatggcctaagaataactccattggccaggtgtggtggctcacgcctataatcccagcactttgggatgccaaggtgggtggatcacctgaagtcaggagtttgagaccagcctgaccaacatggagaaaccccgtctctactaaaaatgcaaaattagccgggcatggtggcacatgacttaatctcagctacttgggagatggtggcagagaattgtttgaacccgggagacagaggttgcggtgagccgagatggcgccatcgcactccagcctgggcaacaagagcgaaactctgtctcaaaaaaaaaaagagaataactccattatttagtaccaattttacccctaagaaaactgtttattaattttttaaaataaaaaaattacttagtaattttatctaaaatataaaccatgttaaaatttcccatttcttttgaaattgtttttaacatctgcctttttttcttttatttttttctgagatgaggttttgctcctgtcacccaggctggagtgcaatgacacgatctcatctcgttgcaacctccgcctcctgagttcaaatgattctcctgcctcagcctcccgagtagctgggattacaggaacccaccaccacacccgactaatttttgtatttttggtagagatggggtttcaccatattggccaggctggtcttgaactcccgaccttaagtgagctgcctgcctcggcctcccaaagtgctgggattacaagtgtgagccaccatgcccgacgacggtatttttttttttttttttttttttttgagacagagtctctctctgtcacccaggcctggagtgcagtggaacgatctcagctcactgcaacctccaccgcccaggctcaagtgattctcctgcctcagtctccatagtagctgagattatgggcatgcaccaccacatccggccattttttgtacttttagtagagacagggtttcaccatgttggccatgctggtctggaattactggcctcaggtgatcctcccgcctcagcctcccaaaatgctgggattacaggcattagccactgtgcctggcctcattattttttctatccagcttctgagcagtcctggattgaagttggttgatattcttagtttttccttttcaaaatcaagaacaatcccctaatattgatttctttaaattgttaaaagtataattttttaaaacaaagtcatgactctcaggcaaatataaatgaacacatcaaagattttatttaaattttgaggaaactagtcagatgttaaaaaccagttcaaaggaattgcaaagggaagtcatctctaggcaatcacaaatgctgaaacgtatctgacaataaatgcaaagtggtttttgttgaggaggaaagaatcactcacatttctaaaacatagacaaaatctatttgtgtctctacagacacaaataatttgcattaattttaaagttatacagtggctcaaacactgtaagtggcacatacccataaatcagatgacaggattggcatttcataacacacccactcatcttgtttctttcgtttcaacgtccttcaaaatttcttcttactttctatcccaatttatgattataataatctcaaaatttaataatcacaaaaaatattggactcatttgtttgggcctaattagttatatggtggtggtaggactgttaatttactatataggcctccttgactttacttcttccatctagaaccatacaatgtaactactaaaaccacaaatgtttttataaggaatttcaaattgtgttttaaaattgctcttatttattattctgtgactataaaactaagctcaaggctgtctttactaggttatacctgtataacatgtaaatttgggtaaactctcttgaagtcctgaaaatgtattaatgcttctaatgtgccaggattttacctgtcttcccatctgtatcgctggagcctggtaagccagtttccctgagagtgttctgtggacccatgcaaaatcaacagttgttccttaagagcagaatgtcagatctgatgaaataagaaccattctcaaatgtgatgctttatattgacctagattgcccaatttattttatattgacctaggttgcccaatttattttatattgacctaggttgtccaattatttttctggtaaaaagtaggacagatttttactgatttctgtgcagactattacattgccatgaaaagtaatgaaatttaggaagaatgtatgaaatctggagtgtcagtaaaaatcagggatcatttagaaatgtttcgtttgattgtagaaaagtggagtctactagattcttgtacatgatagaaagtttaagaagaaagacaaaaggctttgtcatatatctagaaaatggaatattacaacaacatcatgcaaacaaacaaacaaaacagagttttcctcatcagctcattcagtcctaaataattaattcttctcctgctggatcttagattaataatctgatttcactaaaaagagttctagaaatcgtaacatagtccactgatatatctgaaagttgtctaagcattctcagctcagaaacccatgcccaggagataactgtttgaaatgtcagtagttcagagcgcttttccaaaaatctctgaaactgtcttttgttgaagacacaagctgtggtctgtaccttaaagcaaagccttagaaaagcatcagagtgaaacaagtgactatagatgataaagacttaaaagctgttgttaaattactgctgcgaccaatactttcagtttggagaataaaattttctgttgtatatgagttgatatcagtgtttctcctgatagtaagaacatgtaagcatacttcaaaatgtttgtggaaaaaaaatggaattaaaagatgaaaaatgtaactttatttctcaacataatctctgtcaagatccagacacttttgtaagtgatgatagcagccgtttagtccatccccaaggaactgaggctgctggcatttaaccacatcagtacattcttttttacagtattgactgaagataaatggggaccctttacacactttttaaatttaggacagctgggtgtggtggctcatgcctgtaatcccagcactttgggaggccaaggcatgcagattacttgaggtcaggagttcatgaccaacctggccagcatggtgaaaccctgtctctactaaaaatacaaaaattagctgggcatgatggtgagcgcccataatcccagctacttgggaggctgaggcaggataatcagttgcacccgggaggtggaggtttcagtgagccaagatcacgctactgcacttcagcctgggtgacagagcaagactctgtctcaaaaaaaaaaaaaaatatgaaacaaaaataagtcagaaggagccaaattaggattgtaaagtggatgcctaataatttctcattgaaacttgcatatttgcccttcctcaatgagaagagttatcagagctttctcgtggtgcaggaggagtctctggtggagctttcctgggcatgtttctgctaaagctttggctttctcaaaacactctcataataagcagacgttttctttatttggccctccataaagtcaacaggcaaaaatgccttgagcctcccaaaaactgttaccagccgggcatggtgactcacgcctgtaatcccagcactttgggaggcaaaggcaggtggatcacgaggtcaggagatggagaccatcctggctaacacaatgaaaccctgtctctactaaaaatacaaaaaagtagccaggtgttgtggcatgcgcctgtagtccccagctgcttgggagactgaggcagaagaatcgcttgaacccaggaggtggtggtgcaatgagccgagatcacaccactgcactccagcctgggtgacagagcgagactctgtctcaaaaaaaaaaaaaaaaaatgttgccatgacctttgttcttcatcagtttgcctttgcctgacgaccacttccaccttttggtagccattgctttggttgtgctttgtcttcaggattgtactggtaaagctgtgtttcatctcctgttataattcttcaaagaaatacttcaggatgttgatctcatttgtttaaaatttccattgaaagctccacttttgtcactaatctaggcacaagagttttgttacccctcaagaggaaagcttgctcaactttaatttttcactcagaattgtgtaaattacaccaactgagaagtctatggcattggctattgtttgtgctgttagtcattgttcctcttcagttagggtacaaacaggatgaatttttcacctgtgaatcgatgtggatggtctattgctgcaggcttcctcttcaacatcatctcatcccttctaaacaggagttatcaatttgtaaactgctcatttctttggggcattgtcgttataaaattttcaagaaacatcagtgatttcactattttttcacctaagtttcactgtaagttgcttggattttagcagaattcatgttgctctgatagggactcttttcatactcacgtcttatccttcttcttcttcttctttttttttttttttttggaaacaaggtcttgctctgttgcccaagctgcagtgcagtagcatgatctcagctcactgcagcctcaacttccccggcttaagcaatcctcccacctcagcctccctagtagctgggattacaggtacataccaccacacctgggtaattttttgtatttttagtagagatggagtttcaccatgttgccaaggctgatctcaaactcctgggctgaagcaattcaccctccttggcctccaaagtgttgggattacaggtgtgagcaaccaaccacacctgaccatcttatcctctttagtgcctcaaactggatcctactcagacacattgtaacaaattagtatgagtttattttggcacaaaaattggaatccatgcgtagtttttctataatatgcattttctgtgaacttttgaagtttcctcatatggtgggcagaaagggcaccagagactttccataaagcatacaatttctgaaatgtttatagtaataagattttgcaaacttaacctagaggaggctagtgtttcttcagatctgaaaattcttcctgtgcaactcttaaaataacacattagacagacctaattatttctagcatctatttataagttgaaagaacaagctttggtgattttccagggccatttgggagatctcaaagttagttttagggagaaaaaaacatcctgaaacttctattttttatctaaatttggggttcaatgttgggaagttaaaattaataattgtcagaggagattgttttactagattaatacaggatcgtgaataagtgaggggaaaaaacctgtctctcaaagtaacaacatatatttaaaatacaagcataaaacatagaggataaagacaattgtaaagaatcttagctcttccttaagtgaggcaacattttttgcccttaaataatcaagggcataataaagtcatctaaaatcacagaaaactattctgatgagacacagaatctctgctctgtaggcagattagacagaaggcagaggaatttgctttcactggacattttttcatattgtgggtcaaggcctaatcagtaaaccaatgaagcaaacccattgaagttaagtaatttttgctaaaattttgatgttgatgtatctttgtagtttctttttagatatatgtaggcatttgtattaatccattctcacactgctataaaaatactacctaagactgggtaattcataaaagaaagaggtttaattgactcacagttccacatgtctggggatgcctcaagaaaatgacaatcatgatggaaggcaaaagggaggcaggcatcttcttcacaaagcgacaggagagagaagtgctgagggaaaggggaagagcctcttataaaaccatcagatctcctgaaaactggctcattatcatgagaacttcatggcgaagcgcccccgtgattcaattacctcttcctggtctctctcgttacctggggattatggggattacagggattacaattcaaggtgagatttgggcagggatacaaagcctaaccatatcagcattataaaccaacacaagtccaattcactctccaagtggtgtacttcatttgcactgtaggacagacagacgctttaggacaaagtgtggtccaaagacttctggggttccctgaaatgttttcaggggaactgtgagcttcatttacattgtaggacagacagaaactttaggacaaagtgtggtctgaagacttctggggttccctgaaatgtctgcaggggaactgtgagcttcatttacattgtaggacagacagacactttaggacaaagtgtggtctgaagacttctggggttccctgaaatgtctgcaggggaactgtgagcttcatttacattgtaggacagacagacactttaggacaaagtgtggtctgaagacttctggggttccctgaaatgtttgcaggggaactgtgacaccaaagttattttcataacaatactaagctacggagtttttcagaggctatatgaccagaagagattaaatggagaagcagacttgaaaacccatcagttgtctattaagccaaacattcaggatatttttgtaaaaatgttcaaggttgtcatttttctcatacaaattttctttaagaaaatgttatttacattattatctaatggagtcaacattgttatttcccaatacattaataaatatatattttattttctcagttttgtttttgtttttgttttgaaacggagtctcgctctgtcacccaggctggagtgcagtggctgatctcagcttattgctgcctctgcctcccaggttcaagcaattctcctgcctcagccttccaagtagctgggattacagatgtgcatcaccacacctagctaacttttttatttttagtagagatgggctttcaccatgttagccaggctggtctcgaactcctgacatcaggtgatccgcctgcctccgcctcccaaagtgacgggattacaggcgtgagccatcacacccggctggttttagtgatttaaaacatcaaatattgatacttataacccacattataaactacagaaacaaaacatctttagattcctgagtaatttttaagaatctactggatggagagaaaagatgttgagaactgctgctttattcaaaaaccagtctttgttcttgaaaaaaaaaagcataaatatgtttttctttttctctcactctttctgctagtatagttgtaaccatctatataactataattgctatttcagcaagatacttgacagataattgagattgtgtgttgtacataagcattctagctgactagcagaagtcagagacacataaaacataatttttttatagctacacacatccttttttcgctttgcaaagtggcaaaaatgaaaatggtcattaacataagctaaagatttggcttccctcgagcatgtaaaaataaaaataaaagtatacaaacttaaaattatgcttagtagttaatgtttcagtattctttttatcttactttgaaattttctgagtatcaaatgattttcaattaatttaatattacttcaaggttttaacttgcctaaagatcttggaaagcatttttaaggtgatattctggaaaacataattatagttgatataaaaatataaatattcaatgaacaaaaatttatattttttatgatcttaaacattatgtgggaggaagcatatttgaactgtttcggaaacataacccaacataaaacaatatgtatgtttgctttttaattaacacgatacatcagagaaaagacaactgtgtttttttcacattgccaagattaatcttaattatgttaactgagatttttttaaatatttctgaattttttataataaaaatattttaatctaacatatttaaaggattagaagtttattttctgtgaactttagcattaaaaaacatttttaggctttttaaagtagtcacatatggttgatgattttcactaaagcattcacttaagttcctgctaaactccatgatagcattgccttcgatggatgaattgttttcttctcctctacaatctcctaatcggtaagaaattaaatcattttattctcttgaaatcacagttttgtgctaaattctcctccaacattttatcataatatattttgataaccatagttaaaatctttctgctttccataggggaaagtacaaataatccataagtagtcttcatcatcaatacttataatctattattaaatattttgtgtgcttttaaaactcagagaaaccctttgctttctttcagaatggtgtttgttctcatgccattattaaaataggtgcccctgtctttctcaggacaatttttgttggtcagtgcctcagcccattttgtgtcactataacagaataccgcagactgggtaattgataaagaaatctactttttacaattttggaggctgggaagttcaatatcaagggatagatatagatgcaaattcaccttccagtaccttcttggaacttcacacaatgcctctgggggtgctgggtgccatgtctactggactggaggctggagtgcagtggtgtgatctctgctcactgcaacctctacctcccaggttcaagcaattctcttgcctcagcctcccaagtagctgggactacagacacataccaccatgcccagctaatttttttgtatttttagtagagacagggtttcgccatgttgactaggctggcctcaaactcctaacctcaaatgatccacccacctcggcctcccaaagtgctgggattacaggcgtgagccaccacgcccagccgccgtgtctactttgacctcccacatccatgagttcattcattcgttcattcaaaaacaacctattatatatattttttcagctgctataaccaattaccacaaatgtagtggctaaaaataacacatgtatattatcttcaagttttgtaggtcagaagtcctaaaaatcaaggtgttggcagagttacgttccttctggaagctctcagggagagtccatttccttgtgctttccaggttctggaggtgctgccattcctgggcccatggcccctttcatcctcatggccaacagtagccggtggactctttcttgtgtcactctgacactgactatcctgccttccccttctaccttttaaggatcctgtgattatattgctactacctaagtgattcaggatcctcatcatatctgaagatcagctgattattatctacaactttgatttccccttgccatgtaaagtaacatattcctatttgcagggtttttgaatttggacatagacatcattgggagccattattctgcctaccacaatgattcagtgtcaggattattcagcaatacatatgagtttctacaatgggcaagaacatttagtattacaacgaggtactcagccatgtaggtgaagagtgaaatgctatattctactgagaactgttgcatttaagtagattactaaattgtgtaaacctgtgatccatgatgacttgtttcgtccccagacaatgtttgaagaacaatcttctcatttttgtctgcacatcatacatcactcctaatgtattgctcccagtgctttctggacactatttattattgtatctattatatacaagatgaaatcacaatttgtttcatttcataaaatattaacttataaatttttttaggttagaagataatgtagcaatcattcatccatctggcctgatttcactcacatctatggataaataaacagacaccaagatgtcaggttgtgaactccttagttcacctagttcttccttgagctgggactggaacccaggctgtctgaaccccagtatggctcattgttttatttctgtccaagagagaatgctggcttcaggtaaattcagtggcattgccaacaggtaaattcagtggcattgccaacaattttccattttactgaaaatgcagtctgtgcaaggcaaagggaacaccttccttgtttattcaattatgaaaacaaggaatcccattatttcctttgccttatgcattcatgggttgcagacattattcttgggcttcataattttaggaagtgttttgagccttttaaaaaaattgacgtgagaccaggcatggtggctcatgcctatgtcacagcactttgggagggtgaggcaggtagatcatttgtggtcagttcgagaccagcctggccaacatggcaaaaccccgtttctactaaaaaattagccaggtgtggtggcgtgtgcctgtaaacccagctacttgggaggctgaggcaagagaatcacttgaacctggtaagcagaggttgcagtaagctgagatcatgccactgcactccagcctgggcaacagagtaagactccgtctcaaaaaaaaaaaaaaaaaaaaaaaagaggtgaaattcacataaaactaaacattttagaattaacaatccagtagcattaagtacctttcccatgctgtgcaagcaccacttctatctagtttcaaaatattttcatcaccccaaaataatactccatacacattaagcagttagtccatttccctgtcttcccagcctctggcaatcactaagctactttctatctctcagtctctggcaatcactaagctattttccatctctatagttgtgtctattctggacatttcatataaaaggaatcgtattatataatacttgtgattttgtgtttttttcatttagcataatgtttataaggttcatccaggttgtcatatatagaaatcctttattactttttatggccaaataatattccatttatatatatgccacattttgtttatccattcacctgttgattggcatttggagtacctccaccttctgggtatcgtgaatactgctgctgtgaatatatctatacaagtgtgggtttgagtcctcgtttgtacttttttggggtatatacatgggagtggacttaatggattatttggtaattgtgtgtttaactttttgaggtgcttgagcctattccaattagatccaagacaagtttttaagaaatgctctcatgagtccccatgttaactccaaaggcttaggggcagaaagatgctttgaaaaatcaacagatttcagccctgccacttgggacttatgtgaccttgatcaagtttcttaactacactctgaccctcagtttattcctaggtgaaagttaaaataaaaacacctacctcactaggtcagctgttgtaattccaggaaataatgtgtaagatactatactatggcgtctggcaaatagtatcttgttatatgttatatattctgatgattgttatattttctatcttatctcacctcccaccctagtccatacggaaccacttaacttcttgtagggctgaaatatatattcacttatttatgactaaatcctgtggaataaaaccaaggactttatgaagctaagaaatattaaatctcctgcctcttctaatctacacagtgagtcataaagggaatttacctgatcgagtatgatttgtctttcaaagctgtgctttatttcctcctacaaatctgtatttttaaccatcataaattatttttccctatcttcccaaatattaataataagtgtcattatccattcaggctgccataacaaaatatcacaattaaatggcttataaacaacagatatttatttctgacagttttgaaggctggaagtccaagatcagggtgccagcaaggtcaggctctgctgagagctctcttctgggttgcagaccactttctccttatgtccttacatagcagaaggcaactttcataaagacactaatcccaatcatgaaggttgtatcctcatgacctaatcaccttccaaaggccccgtctcccaggggtaccatcatagtaggtgtatttcctaatatgaatttggggaaggaacaaatatttggtctacaacagtaagcaaacataaatgttatccttgttcactcttttccttaacaatgatatacagattgttctaatattttttatgcttcttcagtaactttatctaaagttcttcactctaaaataatttcattgagacatttactatggtactgtttatttttgtaaagttttttttttttttaaacagagtttcactttgttgcccaggctggagtgcagtggcagggtcttggctcactgcaacttccgcctcccaagttcaagcaaagtaattttttagtaaccacttaaaaaattctaactactctcatttccattaaagatgaaattattgtttagattgatttcctaaaatatgtttcttttaaatttcagtcgtaaaaatgtcttttctgttttaaaactaataacatttcccttagccattttctaattcaaatataattaaagtggactctattatcatctttgctttttgttaacatgacttttgattttcttctattctagttataagtgtaagttattttaccctgtaagttaatgtagtgtttgtattcctctttaccccttatttattcttcagcattttttcagcttaaaaatatggaggcctaattttcctgtatgtaagacgtagtgatgtattcacggttttgattaagctccttcgtagttcttcagacactttgcaatcctcttcaaaatatatgagtaaaagcatgtacatgcaagtgggtttggagaatacacaaattcacttataaaaagattactaaggaaggaaaatactggttaacaaactatcattggcaaactagaaaacaactcccatgtgtatgtgtatttttttttcattttagtgtatagtatcttctcccacacacacgaagtatctaaaactgtaattttctgcccaccagtcattctagaacaggtatcctttagaattaaatgttctcatttatctgagccttgtttatcaaaatgtaacttattgtcttttaaaaaggagaagcaaaatttagagggattttctctaaaggctgaatttatttgcctctgctagaagattcccagggtttgccactacttgcccttgttgtaccacttcagagctcatttgaatgtcttatagagaaagacagttatatctctcgtaggcttgttggacttagattcagtttcaaagaactctcctatgttttcattttaaaatatgctctttcacctgtttcttagactgcaactagagtgcaaccagacctaaaactcactagattatatattcctcaatttgcaaattgctgcaacagggataagacgaacatgaaggtagccttggtagaggtcaccaggccccaggaatgtgttgaaagggtcgatgtattaagaactcaactgctgcagccctctgaacacacatttcccttatgcattcattctgaaatatttattcagtacttcatctttacaaagtgctccagggctgaagagacagtgtgcgccaagccagataagttccctgttttcttggagggtaagtcaagtgagggagatgacctcagtctaataaccacaacagacagatgaaactgaatctgcgactcccgctacaaaggaatcatcactcagctacaggaatatataatagggaaattcgcccaggtcttgacctgcgtatttaggtatataagtatgagtctcttttaggactaccgaatagatcatagcatgtctccctcaccgactgcctttctacaggtcaagaacgaagtggcagttccttgtcattctaagtgttcaccactcccatttacttagaggtagactctccgtaactttcaaacagaacagttcgttttgaaaagttcctaaaatagattacagaacttacttcagcttctactgcaccgtttactagctgagtggtttagagaaagctatttgacctctctcagctccaatgttcttaattttaaattgggaataataaatacaaaccttaaatgagtctcgtggggaggagacgagacatataaagagttcagcacagtgtctggcatgtggtaagtgcctagtaaagcatagtagctgcccttattttcttcatcatcaactagcaaagaaggaggatgtcttccatgttgtttgtttgtttgttttatccccattgaatctcctaaacatcattcatattgtgattggatttaaatcttggcagggacacttgacatctgggaataagttcaattgtatctttaatgcacttagttacaactccatgtaactgaaagttacactaatgaagtataaaatggatcttcctttagatatcagtttgtatataaataggagtttctaaagacatttttttttcttttgagatggagtctcactctatcgcccagcgtggagtgcagtggcacgatctcagctcgctgcaacctccacctcccgggctcaagcgattctcttacctcagcctcctgagtagctgggatcacaggcgcccgccaccacacccggctaatcttttgtatttttagtagagacgggatttcaccctgttagccaggatggtctccatctcctgacctcatgatccgcctgcctctgcctcccaaagtgctgggattacacacctgaaccaccgcacctgacctctaaagacatttttaaacaacatttctataaagtcaaagatgcaattctatcatattgaaaaagtgtaattttatattagcccatcataaattgttttatatttggattttgtggtatttaaatttgtatgcataatctttatataaggaaaaatttgggaaaattttcattcataagcctgtaaagcattttcactttagtcattcattagaattttaatatgtttccttcctctggattcaccaaaaaacaacaacaacaatatttttttcccagcaagtcttaacatttgacctcaacagtgatgccaggtgaattctgggcatgttcccagcctccccacgggcagccgtggttcttgtttgtggagggactctctcccctagtttactcacagggtacttccacagtttacattttcactgaaatagattatctcatcttcctgcctgttaactgtgtttgaaaagcaaatcgaatgttgaatttaatgctgtggagatggtgagaaactgctcagaacaattaattccctcattttttttaacagcttaaaaactagcttgcttgaagtttcacatggcatgcaaacactttccctgggcagtggggaatgggtgttgagcccctgaagaatgagtcaccttttctgctcttaacctatctggacttcccctgaaaaatcaattgtcagccgagtttgggaaaattatttcggccattagactctgaaattcattctgaattctgaattactgaaattcatttatagattcagtgagtagttattaaaatcttgctgtgtgtcaggcactatgctgaatactagcctttcaaaattgaccaagtcagacttagtcactgtggaaaagacattaaacgcaaactaggaggaaacaaatagaaaatacttccagtaaattatagtaggtcattttaatgcagggtacctaagcacacagtctgggccattggattcatatttgaggatcagtgaggccttcctggagtgtgtgaggttaaagatgaggcccgagaagtgattggtgatgatggtagtgtgataggggcagtaagtagattttgaatgcttactttttcctaggtattctttagctcttgacctaaaatatctgactttaaccccacaataaatcccaggagacagtttctttttctaatcccatttcacagacgaggaatctgagccccagagaggttaagtaacttccccattgtcccataactacgaagcgccagagcctggattcaagtccagacacagaaacaatagtgaactcagctgaggaaagagaatgggaaaaatgcttgaaaggcaggggctgtgtgtacaaagcaatggaggatagcaaggaatggccgtttctttcctaggcaaagtacaaagagtaccaggcagacagggaaagaggaagccaggtgggccacgttctgaagggtctcgcaagttccattcagaatctgcaccagctgaacttcgtgattgtactgcagttacctaacagtgtcctcctccttaggaggcactaaacaattagggggtaaaggatcgtgatgtttgcaaattactctctaagaactcagacgctacatagcaacaataacaatacagttatacatatagtaataactatgttatattcattatatgtaagtagagacagaaagaggaaatctcacaaaattgataacaagtggttaacctaggtgaagaacagttttttgtacaattttaataactttttatgagtttgcaatattttgcaaataaaaagaagaggaggaggaatctactttattttatttatttatttattgaggcagggtgtgatcagagctcactgcagcctccacctcccgggttcaagcaatttttccacctcagcctccctggtagctgggactacaggcgtgtgccaccatgcccagttaatttttgtatttttagtagagacagggtttcactgtgttggccaggctggtctcaaactcctgacctcaggtgatctgccccacttagcctcccaaagtgctgggattataggcatgagccccggcactggcccccaactgcagaatctactttatatgtgtgatggggattcactcagtggaggattgtatgctatggagtgacctgaggaaatgtacacttgaaggtgtgggaaacaagctgctgagatcaggaacagggaggccacatgggaggatcctccagccatgctgcaagatgcctgccagcctggagggagctgtgacctggtgtccataggtggcagcaccaggacataacgtcagcatagtgagtcatggttttgtttaaactgcaattgtgaaatatgatcacagcataagaacatgcattttttatgagttaattgagtctaatttttaattagttaattgagtttgctataaaatccaagatgtatgaaaattaaaaacaaaactccaacttctccaaaaccttctctttattttttaggcttatgctggcttctttattcttagactcctgtaatcattgcctgtatttccagaattcagatctcattacaggttacatggtatccaaacatgagtaatgcatactttggaactttttaatggcaacttaatgctgacctatgttagttactccatttcatgtaggaattacctcatgtacttatattatatccccacaaataatttatgaaattctggttcagcacctaggtaattaagcaaatttacttatatgtatgtgcacgtgtacaaatataagtatatatacacacacatatgtatttcccccttcccttaacagatttctaatatgagagaaaaaagtaaactaatatttgtttgcatgcaatgtgagaaatgatagacatccattttgcataccagggcaaaacaatggaacctctgaatcagactgtaagtaaggtggctgaaagtggggacacactgaggggtcaggaaaatatttttcaaaaccataagacgtaataggaattttaaaagacaagcaggaaatagctagaacaaggaagagaagtgaggccttctgtagaagttgacactctgccaatttcatcttctgcatttgacaacagggggtttattggagtctcttttgtttgaatcctgagtggcaacaaaatggtaataatgtattacttgccttattgtatgtaacttaattttctgggctttttaaacatgaattggaattagatgcaggattccctgttgtttttgagaaattcagtcaatgtttctcagatttaaccaattgaggctgacatctgccttgtagcatcccagagaatccactttctctggtaattgaaatgttgttctacaagagaggttgaaaagttccttctatctgctttcacttcagttgtcagcctatcctgtgctacttgtgttcccactaagatttaggagtggctcagaggatgacgttctaccaaatttcaacacagtgactggctggcaagttagtgaacttcaccatcctatagctacaggctacactgatgatgattttcctttacgggtgaagcaggaggtcatttgagtgcagtaaggtgttgtataatgacaatgacacttcagtccatgacagacacaggatggtggtcccatacaattatagtggagctgaaaaattcctatcgcctagtgacactgtagctgttgcaatgtagtagctcaaggcattattcatgtttgtggtggtgctggtgtaaacaaaactgtgctgccagtcatataaaagtatagcacatatgaagtacagtacataatacttgataatggtcatgaataattatgttactggtttatgtatattgtatactttttattgctattttagagtatactcctacttataaataagttaacggtaaagcagtctcaggcaggatcttcaggaggatttccagaagaaggcattgttataggaaatgacaggtccatgcatgtcattgcccctgaagaccttccagtgggacaatatatgggggtggaagatggtgatatggatgatcctgaccctgttaggctaatgtgtgtgtcagtgtcttagttttcaacaaaaagtttaaaaagttttacaaatttagaaacagaaaaaaagcatatagaatacagatataaaggaagaaaatatatttatatggctgtacaatgtgtttgtggtttaagctaagtgttattacaagtgtcagagttttaaaaattaagaagtgtataaagtcagaaagttacagtaagccaaggtcagtttattattgaggaactttgttgtatacatttagtgtaacctagatgtacagtgttcataacgtctacagtggtatacaataatgtcctaggccttcacattcactcactcactgaatcaggagagcaacttggagtactgtaagctccattcacagtaagtgtcctattcaggggtacgtttctttttttttttttttagacagtctcactctgttgccaggctggagtgcagtggcgctatcttggctcactgcaacctccgcctcctgggttcaagcgattctcctgcctcagcctccggagtagctgggattacaggcacacaccaccacacccagctaatttttgtatttttagtagagacgagacggggtttcaccatgttggccaggatggtctcaatctcttgacttcgtgatccacttcggcctcccaaagtgctgggattaccggcatgagccactgcgcccggcccaggggtaccatgttttttatcttttatactgtattttcactgtaccttttccatgttcacatgtgtttagatagacattgtgcatctacttaccattgttttatggtttccttttttattttttctggtagagtcttgctctgtggcccaggctggagtgcagtggcacaatcttggctcactgcaacctccacctcctaggttcaagcacgtctcatgcctcagcctcccaagtaggtgggattacaggtttgcacaaccacacccagctaatttttgtaccttgagtagagacagggtttcaccatgttggccaggctagtctcaaactcctgaccttaagtgatccgcctgccttagcaccccaaagtgctgggattataggcgtgaaccagcacgcccagccggtgttatggtttccaacagtattcagtccagtaacatgctgtacaggtttttaacccagcagcaaaaggctctaccatccagtctaggtttgtagcaggtgataccatctaggtttgtgtaagtatgctctgtgatgtccacacaaagacctatttctcagaatgtatccatgtggttaagcgactcatgacagtaattaaaaacgtatgcttactatctgtcctaaggaggataggaatgtgatttttcaactttacctgtgtccctgtcatcacttacaaagctgttgaaatgccatctgacacagttctttaatcacatgtagtagacccctgtacagtctccccagcacttttcactgtgagcatttgctctgtggcatgtcttaatacatattactgatggagtactgaggctccagctgcccctttaaattgtgaacctatttgtatttccagcacttgctaagacttcactggtttgggaagatgacagttcataatggtaagatcctataacaggaacaactgaaacctttaaccatctagagcaagctatgttcttactgaattccaataactttattggggtataatttacacatcatgcaaatcctccaggtatatgtccagttcgatcatttctaatacacatttataattgggcaaccagttatcacaatccagtttcagaaaaataaaccctaaaaagtttttcgatgcatatttgagccatcctcactcccaccttcagccctaggcaaacactgatcaactgtctgcttatagagttttgtctttttttctagaaatgttagataaatggaatcaaatgctatgtaatcttttgtcagtcttatttccctcagcgtaattttgagatttttctcaaagttattgtacgtgaaactcttcttgatgagcaaaactccattgcaaggatacgataccttttgtttatccattcaccagtagatggacatttgcgttgttattgtgagttacactgtgaacatggcgtaaaactcttcgtgtggatctgcactttcatttctcctcagttggatacctaggagaggaattgctggctctaacagtcgtgtgcttaacagtttcagaaattgctcgaatgttttcaagtggctgcaatattttgcattcccaccagcaaaaggtggtggtggggagcgggggtgttggtttctagtttctctacttcctcaccgacactagattttgtcaacttgttcattatagacgttctctaattactagtcatattaaacatcttatccatgtgcttattaacccagtcgtatatctcgttaagtgaaatgtctattcaaagcttttgcctaattacatggcattgtgttagtcatgccgtgcactggcttgttttcccgtgcatagaagttttgttttccttccttagaagaaaaagaactcaccccactgagttcgttaagcattttgtgggtacaaagataatgcaccatgattatataacctgagaggtgtttgtataccatgcagtattttgcatagaaaatgaaattctaaatccgacttctgaaatcaaaaccctggtgtcctcccatttggctcaatctctgtttcattgtatatatttgtcgatgactcatggtttgaaaatcacagaccataagcctcataagaggtagagctgaatctctcttgcagcttttccatgagtaactatttagtgttaattatgattaagacaataactctttaacaaagcataagtaagtcagattaatcagccagctttcacgcacactcttcctgggttctagagggctttcgtcagcaaattgaagcaatgacgatgttctgcgtggtactgttgtttccatggtaaatatgtgaattgattacccatgagcccaggtcacaatgtactgttgttgtgctttattccttattatgttagaaatcccgcacagcaggggactggtatctactcccgggtcaccttgggacttctaatatgaaaattgaaatgaattctttgttgttgtaaattgcaaacagaaaaacagtcgcctgtttccacacttataaatatgtatgtcctccccaccaatgaaattatggtgaaggatagatcaaagtgaattagcacctgtcaaggaaatatgataggtcattctgccctataattttattcccctttcttccaagggtgacatgatcagcgaagcctgcatctcgctctccttcacccattgtggttaacagcagttcaaacgtggaaatgaatcacctgctatattacttctgtgcagcaggaggcaaattgaaaaactaaatttttacaagcaaaatgagtatggctgtatttggactctgaatattgcttagtatttgtgtctagtattatgctgttgtgtgcctaaatgttgtaaacatttgttgtctgtaaatctcttaggatttcataagaagcttccaaagccagaggtctaaagatctattcacttggccatataattctcctggctgtgttaaccttaagaattgtattgtcatcatatcctaatccatcatgtaaaaccttattactaccacaaatattaatgccaaaattgcttttaaaatgttacagatttttttttaaagagagaatccaaaatatatggcagaaatttgaaataaaaatgaaaaaatcggccgggtgcagtggctcatgcctgtaatcccaacactttgggatgacgaggtaggtggatcacctgaggtcaggagtttgagaccagcctggccaatatggcaaaaccctgtctctactaaaaatacaaaaattagccaggcatggtggcacacacctgtagtcccagctactcgggaggctgaggcaggagaattacttgagccctggagctgcaggttgcagtaagccgagatcgtgtcattgcactccagcctgagcagcagagtgagactctatctcaaaaaaagaaaaagaaaaattaggctggatgcggtggctcacgcctgtaatcccagcactttgggaggcggaggcagacggatcacgaggtcaggagatcaagaccatcctgcctaacacggtgaaaccctctctctactaaaaatacaaaacatttagccgggcatggtggcgggcgcctgtagtcccagctactcgggaggctggggcaggaggagaatggcgtgaacccgggaggcggagcttgcagtgaaccgaggtcgcgccactgcattccagcctgggtgacagagcgcgactccgcctcaaaaaaaagaaaaagaaaaagaaaaattaaaattaaagactaacgtcgtctatgtttatactatctgtgtaatttgcaatgcagagtaaggaacggaaccgggtagaagaagaggaaagccataaaatttaaaattaaattgaaggattttttaaaaacaagaagagcaaatatcagggaaaagagaataaatagtaagtaaagggccaattttagcttaaagaggaaatgccaaaagagcccagaccattgcagtagcctcataacagctttcccagacttcatcctaaatcctgattctgttcacatctccactaatgacatcttctaaaattcaaatgtaatcatatcaatcactcatgagaatatttttctacttaatatttttacttacttgtttgcttttcatttggcctatgatattcacctactgataatacacattgtatacttatggaatgatactgtaattagaaaaattttttattgtctttgtccaattatgggtggtattcctatttcataaacagtcccatcttcttaagtttctcatgagattttctctcaatcacttatgtttccataatcctcccaatgtatcttatgtcttcataaggccagaaataccaaagtggaaattacttttcttcttaacaatttcttgtcctttataaccaaatattagtgttctcaatatctgttgtgctatttggtggacaagtgtttgagctggatgttcctttctttttcttttttcttattaattagggataatgcttttttttcagtaaattcatagctattttctttatcatttgatatagtcgagaataaatttatcaatggttgtttagtcataactgtagcctcgcagccatgatcatccttccaatttgcactgtggattcttgcttatacattgttcagtttgatggggaccctctcttgtgtgcatgctttctctcttgctctctgtcaatggtaaatattcatgtttctgaaccgcaatgctatgtctatttgggaattttccagttacttattcacatattccagaatgttttccaaatgagaatgctaagttaaactgtcatacctatcatacacgtttgcatgtgcaatggcctgcttagatccacaaactgattggcatgcctgtttgacacacagcatgatgtaggtaatgaaaatgttctggttctacaacatattcagggtcttccatgtcactcacgcatagcagagatcaattacagttctcacatttacagggttgacacaaaagagatgaacaatcctaccaccttgatataaaggcttgaaattttttgataagaaaattaaaactctattttggatttcaagcctttaaaaatgtatcaaagtaagtgtcttgatgtgagggttaagagtgaatatgattctctttgtacatagaataataagaatagggtgttctttcacaaacacctttcaggttcatgaaaattaatcgataaacttgaaaagaacatcttattttattttatttttaaacagagtctcactctgtcacccaggctggagtgcagggcacaacctcggctcactgcaacctccacctcctgggttcaaataattctggtgcctcagcctcccaagtagctgggactacaggcatacaccaccacgcccagctaattttttgtatttttagtagagacggggtttcaccatgttggccaggctggtcttgaactcctgacctcaggtgatccacctgtctcagcctcccaaagtgctgagattacaggcatgagccaccgcacccaacgcaaaaaagaacattttaaaacaacatgattttcagtgatatctgcctacttttctcccatctaaattcagagcctgggctgtctaggaatgcctagagttccttaagcacttcttagaaactttgcttccccatagacacatttattgctggtgagaccagggaaacatccctctcctgcttgttaatggagcctgtggctgctgatggtcatgagtatcgcttgccagttcaggggatgtgcttttctttttctccaaacactcctgattcctctccaacccagaaaggagggacagtgtttgcatggtaccaaccaacacgctatatccatgtatgaggccaaagtgtagattaagatcaacagacctcctaggttttgtgctttgggttatggcagagctcttgacacaaaggactatgaagcatttcacaatttttttttctttttaataaaagttacatgtttcacgttaaaaaaaacagtgcagatgggtgtagtataaaaagtaagtcttctttattccctattcataccaagttggccattctaatactccctatcctcagagataatcaccatgaatagctcccaatgtgtacttagaaatataatatagaagtatgcatgcctacaagtgtgtaatatacatgtgcctatatctttttcataaaaggtcacaaatagaatcctacagtaaattctactttacagcttattctttttttcactttaccaatatctagacatcctcagagatcagtatatataatactaccttattctgataaaaagctttacagtgttacgttgtatagctgtgttgcaaattattgaatgaggttgttaagggtagacatgtagaattttccaacatttaagatattacaaatgatgcttcatgagcatctttgttctagccttagtctgctttggctgccttaacaaaataccatagaccgagtggcttgaacaatagaaatttatttttcacaattctggagggtatgaagtccaagtcgaaggctccagccgattggaaacctggtgagggctctcttcgtggtttattgacagctgccttcttgctgtccttacatgacagagagtgagctctggtttctcctcttctcataaggacacaaatcccataagggttctctgctttcatgacttcatatagatctaattacctcccagacgctccacctacaaataccatgacattggaggtaatggtttcaacatatgaatttgggggagacacaagcattcagtccataacagttcatgtatcgctgtatccttgagtatatcatgtttataagatatattgttagaaattatattgctgggtcaatgaataaatagacatagtaggttttttgtaaacaatgattgctctcaacaagtggttcatgagcctcacatcacctccattctggttattgctttttattttattttatttcacttaatttaattttattcattgttaaacttttaaatatcttccaatccaataggcaagtaaaagaatattactcagtttttcaataagattgagtgagcttgaacatatttcaaatgatttttgaccacttatgtttttgttctttgcagtaagttttgagtcctattgtattgagttgacttttttcttatttacacataagctcttttttcatatttaagacgttagtctcttggcatatgtattgcttagtcttttcccagtttgctgattttcttttgagtttgactattgggtgttccagctatctattgccacattatacattatcccatgtcttttttttttttttttttttcctgagatggagttttgctcgtgttgcccaggctggagtgcagtggtgtgatctcagctcactgcagcctccgcctctgggcaattctcctgcctcagcctccctgggaggattacaggtgcctgctaccatgccaggctaattttttgtatttttagtagagatggggtttcaccatgttggccaggctggtctcaaagtcctgacttcaggtgatccacccgcctcgtccacccaaactgctgggattataggcatgagccaccgcacccggcctatcccatgtctttaaaacaaaataacatattactttttaaaattctgagggttatgaatttggaaagggccccatgaggacagtgtggtgctcttcctgtatgagttctgctggagatgtggtgtctcagagacctcatctgcttaggtgtctggagctcagctaggaggtgaggatggctggcagccaactggaatggcttgactggggctgtagtcctggggcctcagttcttgggtcagctgggttctgtgctcttctccatgtagcctccagggctctctatctccacgtggcccctccataccacctctccacgtgctgtgttcttcttgcagctgtacttcttagttcaggggtgtccaggagtgcaaatgcaggacctaccagcactcctgaggccaagttctgaagcgtccgtcacattctcttggtgaaggccagtcacaggcccagctcagattcacgagggtgggggggtacaggggcatgccttttgccaagaatggtttactggtgaccaccagtagagcagactacaagaagattatttctgcttttgttacgttgccatagaaatagtttaaacattttattggtagtcagaggtttgcacctactactttatggcttctggttttaacgtccgctcaaggaagatatcaccagtgcaatcttagaaaatttttcatcatccaactttttttttttttttttaggacagattctcctctgtcgtccaggctggagtgcagtggtgtgatctccactcactgcaactgctgcctcctgggttcaagcaattctcctgcctcagcctcccaagtagttgggattacaggtgcccgccatcacacccgggtaatttttgtatttttagtagagacggtgtttcaccatgttgaccaggctggtcacgaactcctgacctcaggtgatctgtccgcctcggcctcccaaagtgctgggattacaggcatgagctaccatgcctggcccatcgtttcttatacttttgatgctttctttgatttttcgcacttgaatttttattttattgggatttactttgtttttaaggaatacaatggagatctaaattaaactttgtaattttttattaacctgttccagtactgtattacggaatgacccattgcttcccactggtttgaagtgccatttttatgatatactacatttctatactgacgggtatttatttccatactctctgtttgcttttctccttccattttcctccagtgacaataacaccaagatatgttgaatagcagatttttttgcaatgtttttaggtacatggaaaacagagacattatccagggttgggggacataaaatggacacaaggtggctttccgaagagttgaaatatctggcgagttgcaggagttctgatagaaatggcctagaaaacaaccccggaagtcatcacttttttttctacagaatgtgggaagggggtttaagctttgttgaaaacagtaaaagtgtgacctcatgaggctgaatgactaaattcatctgtattatatttggtgggctgaactgtaagtcattccaccagcctgtcacaaaggggagcgactgtgacaattgtgccagctgtgtgtatatgagtgaccagagtgaccacttcctctttggcactgggcagcctccataggatgggagagggacagtgggcatgtcttggcttcttctctagagtttccctccaaaaatgagacaaatgaaaataccattctccttagtaaaagaaagtccattttctatttaaatatgggtataccttggagaaaatgcagtttcagttacagaccaccctcacgaagcaaacatcacagtaaagcaagtccacagttattttggtgtcccagtgcttctaaaactaactatgttgtagtctattaagtgttattaccattatttctttaagaaagtacatacttcaatttaaaaatactttattgctaaaacatgctaacaatcatctgagccttcagcaagtcataatctttttgctggtagagggttttgccttgatgttgatggctgctgtctgatcaggcagggtgttgactgccaaattgtttgggcagctgtggaaacttgttaaaataagacaacaatgaaatgtgccacatcaattgagtcttcctttcatgtgtgaaagaagagttctctataccatgatgctgtttgatagcattctatctatggtagaacttccttcaaaattggagtcattcctctcaaaccctgtcaaagccactgctttatcaactaactacaagtaatattcagattctttcagccgggcgcagtggctcatgcctgtaatcccagcactttgggaggctgagctgggtgggtcacctgaggttgggagtttgagaccagcctggccaacacagtgaaaccccgtctctactaaaaatacaaaaattagccgggtgtggtagcaggtgcctgtaatcccagctactcgagaggctgaggcaggagaatcgcttgaacccaggaggtggaggttgtggtgagtcgagattgtgccactgcactccaccctgggcaatagagggaaactctgtatcaaaaaacaaacaaacaaacaaaaaatcctctgttgtcattccaacaatgttcacggcatcttccctagaagtagacgccatctcaagaaacaactttctttgttcatccataagaagtaaactgttcaagatttatcatgagattgccacaattcagtcacatcttcaggccccacttctaattctagttccagttacttcctccactgaagacttgaacccctcaaaatcacccatgagggctagcgtcagcatcttccaaattccccttcatgttgctattttatctcctcccatgaatcatgaatgttgttttccttcccccaccggcatgttttccatgaaggttcttaatgacatctagactattttactatttcactattgcactattgccaagagaatagtgacacccataaccacaacgttaggtcatgaaagcattgactccatttagtcatccattcattcacttatcaagcagttatagtatgtacatgctcttatagactatttgtggaaatctcttctttgggcctcaagagcacctctgaccagggtaaaacctgcttttagggaggaaagtattgagacactgtccagcggaagcaagagagcacatgtcccgaaagcctaagatagaggggctggaggctgcgtcagtgccacctggcagtcatcatcttttcatacatgtccggttccttctatgagttcctcaggccctattactctacatccattttcttcccaccattaatatatgtgaagaaagtatgcaagcgctctctctcgttttccagtgtaaacgactggagattctttttttttaatcaaaagaaatgatttttattgttacacaaaacatttcttatcagggcacacatacatctagagagcagctgcattttcagaacaaatagatgaaatacctttggtgaactgagagttggggaaaacaagtcaccttctttaaattttggtaatgtgtttactgaatttaaacagaaatcaaaatcaggacagagtaagaaaaaacatttctgcggaaacaaaatgccttctcatgagcagagcctattgtgatgctcattaacaacgtgagattcttttaagctttctctatgaatcatttgtgtgagcatcctgcggatttagttctccatgtattttataaagaaagaacaggaagtaccaacaaacaggagagcctcgtgcattgactcactggctcacgttgctgcctgagagtgacacagcgccccttacattacaggcctctcttcaatttattttatttttttaatcattttgtattatttctctgtgttatagaacacaggacacagtggctgtagctacatttggacgtcaaaacacattttagactctttgtattgatttagagtttattacagtgagttacagtttatatttttccatgttcttgtttgccaattaaatgtctattgatacaagggataaataaaaagaaaaatagttcgagatgcatttttaaataattaatagattaagggttgtacctttaattttgttattgctaaattttgtctgtccaaattatagaactggtgtttttttttttcattgaaaagaacttcactgattttgtgataattacataccaatctggattttaaattaaactattcgtttttttttcttgtaatcacttcaggcagaaaaagaataagtaaagtgtggaataaaatgttttttacctctgtcaaaatgatttaagaccattttactctacctgtgtcatcaaacagaattcattaaatatccagaatacagtcgatatgtcaaattccaggaggttcagaaaatttagaagatattcctcccctcaaagtaactggcaatctggcaggagaggagaaggaacatacagttgaatttgctgtgagagacctgggcttgtataaacaagatgccctgtttccatccggaagattctttcagactaggacctctctaggtatcgtccatgtaccggaaatctgccccactgactctcacgtgctccccaggtcattgacggttccgagctaaattgattgaatactgctgttcacatttatttcacaaatgtcaagttttgagtttcactttcctggaaaattccttatgttctttgttgttgttgttgttgttgtcgttgttgttagtttgagatggagtcttgctttgtcacccaggctggagtgcagtggcttgatcttgactcacggcaacctttgcctcttgggttcaagccattctcttgcctcagcctcctgagtagctgggattacaggcacccgcccccacacccggctaatttttgtgtatttagtagagacagggtttcaccatgttggccaggctggttttgaactcctgacttcaggtgatccacccgccttggcctcccaaagtgctgggacgataggcataagcccctgcgcctcgccggaaattctttatgttctaataattgcagccttcttaagtttgcacctttgctgagagcgctgtttggtcctttcgatctcagcaaatacagtccgaactctacagaccatcctggctcacgtcttacgtcactttcatgccattgtttacacttctcctgctattttcctctcttacgtccccagtgcacattcacaaaaataaatcaatgacacaaagttttatttcaagcagtaggggaaagatgaaaacttgaacataaataagacaagttagaataacttggcaaatgtgagctgttagcaaaattcagtgctaatatagaatatgtgtatatatgtgtaaaaatgaagagatttgcaagtgtggttatgttgcggaaataatttttaaggtgtaataggagttgagatgctgattgcctcaacaataactagtttgtgcatcccattcttttcgagctttttttttccaaatagtctcaaaacccttgacgattttgccttatttttattcaaagaacagtgaagtttcttgtaaaccagtgaaattcatctagaaccagcatgaaataatgttctccaaaatgaaatacagaagtgtatcctttatccataagggcagagaaaagaacaaagccataggaatagtactgaaaatttcacatctcagaggaatatctggtgtgatggttaacattgagtgtcaacttgattggactgaaggatgcaaagtatcattcctggtgtgtctgtgagggtgttcccaaaggagataaacatttgagtcagtggactgggagaggcagacccaccctcaatctgggtgggcaccatctaatcagctgccagtgtagccagaataaaagcaggcagaagagcgtggatggactagactggctgagtcttccggccttcatctttctcccgtgctggaaactttctggcatcgaacatcagactccaagttcttcagcttcggggcttttggaccttaaaccacagactgaaggctagactgtcacttccctacttttgaggttttgtgactaggactggcttccttgctccttatcttgtgatcttgtgagtcaatactactaaataaactcatatatacatatatatatatatatgtatgttctattagatttgtccctcttgagaaccctgactaatacacttgggtataactcaccctgatccctagaaggttgtaaaaatactcacaaaattaatagcaaaagaagctactggaaatcatctaaccaagagaaagctagatggagtcccagagtcgagtggcttctccttggccagagaggtcccttaagctacagcaatgagaagccatgtcctgtgccaggcacagagcttgctgtcagccctctgatgctgatggtggaagctgggcaaatgtcagcaaggttctgagaagaagtttctttcaacatggattcctgtacctattccagttcttatcaaatgtgtaaacgagttaagacacattcagacatggagcatccagaaattgttatcttccatgcaacttttcaaaaaatataccatgatattattatatgatatggactgcagtaaaggacaaggaaactcaacaatgtggaagacacatgcaattcagaatgaatgaaaagaattcccaggctgagcatactggcccatacctgtagtcccaacattttgggaggccccaggtgagaggactgctgaaagactagagttacagaccagtctgggcaacatagtgagaccctgtctctcttttaaaattaaattaaattttaaaaagaattcccaaaggaggaaaaaaatacctgaaaatgtccttttttttttttttttttttagatgcagtggtgtgatcttggcttactgcaacctccacctctcgggttcaagtgattctcctgcctcagcctcccaagtagctgggattacagccgtttccaccatgccaggctaattttcatatttttggtagagacagggtttcaccatgttggccaggctggtcttgaatgcctaacctcaagtgatccgcccacctcggcctctccaagtgctgagattacaggtgtgagccaccacacccggccgaaaatgtactttaaaaaaatatatatataaataaaacccaagataaaggaaggcaggggattcagtaagaaaattccagaaagacagcttggaagcggatctgaaaaggaaggagtcaacttagagcagtcagttaacgagacactgaatgagctgggagagctgagcactcccgtggggaatccctgtgttgcttctgtcaacaagaagaaggaaaggcagctttgacactcaggaaaagcaaaagtctacaccagaaacctgtccatagacatacagcaaaaagatttttcaaagttagtgtaaggaataattattcgtttgatctgaatttcagaaaattcctcctggggtgacccaggtttaggaacacaagaatgagactgtaccttcaggctccagccagcaaacgtagttagttagtgtcacgagtgtgtctatttcacttccagcatccactcagaggcaaggcatgtaatcatggttgttaacagaataaaacgtaaatgtaacaaatcttgaaaatgtaacaataatggtatagttgaaaaaaagctgggaagtggagggagacgaggtgaaaataccgcccaggctcctgtttctttattttacgtggtggatattcaaggtggggaccaaacttcgcagatggagatgtagctaagcattaaacaaaatttaagtccgtgtaagagttaaaaattagaatgtcaatcagaaattgggaggggaagaatgcagcagcagagccatccacaccttgacctccacggctgcagtcctatcctgactccccccacatcagacctcccattcccttgccttttgtcctctgcatctcaaggtctgtctctgcagctcggcctctgcacaaccccatcttgctggccacacgctcttcttgacccacacccccatccccagtccctgtttcccaagaggatacagagatggtgttggctgaatctgcgacttggcacatcccaagttcaggctttcacagaggcccaccccctgcggtcttacctcacagggaatgtgtttttaaaaacaaatttgaggtcgggtgcagtggcttacgcctgtaatctcagtactttgggaggccgaggcaggcagatcatgaggtcaggagatcgagaccgtcctggctgacacagtgaaaccccgtctctactaaaaatacaaaaaattagctgggcgtggtggcaggcgcctgtggtcccagctactcgggaggctgaggcaggagaatggcatgaacccaggaggtggaggttgcagtgagctgagatcgtgccactgcactccagcctgggcaacagagccagactctgtctcaaaaaaaaaaaaaaaaaaaaaaaaccccacaaattcgaaaacaagccaacacaccttgccccctcaaaaaaggtctggctatttttttccccccaaactgtgggcgtgctggctcagcatcctcaggacccagctgttgcttaattttaacttattattttttaattaatccaaataaaaagttgttgggctccaagacaacctgggcacaaaggttctgaagggcagtttcctagcagccccaggctcactgtgggaagggaccatgttgtcatttcctcatcattccatggggtgtgtctgcctgggccaaccctgtgtgaagaggccagtgctggggacagtctgcactctgcttccctcctgtttctcctgcccaccccagctccctgtttgtatctgaattgtggatcctgcagacgaaactgcagccatagttatttgactatatcttaactgaggacttgcattgcaaagccaggccagcactgcgcatacatacaataaaagggaccattaaaaaaaaaaaaagaaaaagaaaaaaagaaagttctctgtgttcccaggctcctccctgcacactttctttatctctttcctcatacttaagtgggtatatctgtttcattctgaggcaaaatattcatcagcccttttgaccacaaatccaaagcactgtgttttgtaggttttgttaggaataaaatatgagctcatgtcctctgtctttccctgtatttctgactctaaattggttggcaacccaacaaataatatttgatgttcattcaccctaaaaacaacaattttcctcccatcagaggctgcatggaggtagatggcggctgtcagctcagaaacgaaggtcccaccctcttttctttgccttcgcgaagtttgacttctgtctccttggtcaagacatattcatctttttgactcagaactagctttcatccaacaattggtgaaagtttagcaagcagatctccgaggtaaacaaaagagcccactttgcagttgctgccaatttctgtggtgtaaatacacccatctgggccagcttcaagctaccagtgtctcctcactgagtacagacttgggaaggaaagacacagttggctctagagccagtgcagccgcctccagcacaacgctgcttccgtcctgtctcctttggaaagactcctctaaatccctctcactagatctagacactgggtgctgggcaacttcggacatctgcctttaaagacaatagcgatgaacagttcccctgaaggtgaggatcagatgactcactgccttacttgttaagtagagaaccagccagaaaccagtattccagcacagtgcaccgtcttgcccatcttgcagcacacaactttctgagagcaggggtttatacaggcagcatgaggtgtttccctaacgctgtgccttagtgcttttgtcctatgtaagaaatacatagatgagccgggcaaggtggctcacgcctgtaatcccagcactttgggaggccgaggtgggcagatcacttgaggacaggagtttgagaccagcctggccaacatggcgaaactcagtctctactcaaattacaaaaattaggcgtggtggcaggctcctgtaatcccagctacttgggaggctaaggcaggagattcacttgaacccaagaggcggagggttgcagtgagctgagatggtaccactgcactccagcctggggaacagagcaagactctgtcgcaaaaaaaaaaaaataaataaataaataaatagatagatagatagatagatagacggatgtctattacatttacacacacacaccagtgactctaaaccactctctgcctaaaaatataattattttgagtgaataagcaaaaccatatgaaatatttagaccgtcttaacccatttaggttagacttcttattgaatcacaacacacagtttgaaaagactacacagcagtcttctctcgtgatttaatcaaaagtccagttcagaagccagtctcttctgagcctctgcagcctggtgacgttttgacatcttgcaagtgggatgaagcagaccatgctcacagagggtgcgaggacggggccggccaggggagtgccctgacgcattgctggaaagaggcagcataagcccagccagggtctttagggaaatgttaacttagaaacccctgttctcctatttttctcaagtcaaaggaagagtctgctattgataacattgcagtgaaatggaggtagaggaatttgcctttcgtttgggaagaaagtaccattcggaagcaaagccccgtgtgtcagcatcacacgctctgattcatcacttaatgtgcaggccaggttaggctgctggctccatgactcggcatcccactctctccaggggaacttgcacctcgcagcccaagctgaagcactcgcagctgcagcagcagggtcagaggaccctttctgagaatctccagttacctcctggacaaaatcaccgtccttttgccatcatacctctctctgttcaaatgcataaatcactgagtctttcctgcagccacgatgaatttacaaaatgtaacaatcaaaacctgttcttgttaatatttgttttaaggcaaatatctacatttttatgtccttctccctgtttaaatcagacccgctccattgtttgtaatctgttgtctgaatgccgttgtttctgtatgccagaccaaaaattccacattagaacacttatgggcagagtggagtggaatatttgaaatttagaccatttcagaaaatctgaggtgtgttgtcttggcagctttgtaatatctcatgatgtgagtatttggacatgaggaaaatgagacgaatttactcactccaggcacaggggtgaaggagactggcctgcccatcctctgccctactttttctctcccccaggcaggactgatttatcctgcagtttaactacatactggagacatgcttttcctcgcactcagtacactacgtctcttccttgggccatcgatccaaactgcttttttacttttcttattaaatttattgattattggctggacgcggtggctcacacctgtaatcccagcactttgggaggccaaggccggtggatcacctgaggtcaggaggatcacctgagtcaggggtttgagaccagcctggctaacatggcaaaaccccatctctactaaaaatacaaaaaaattagccgggcgtcctggcatgtgcctgtagtgccagctactcaggaggctgagacaggaaagttgcttgaacctgggagttagaggttgcagtgagccaagctcataccactgcactacagcctgggtgacagagcgagactccatctaaaaaatatatatatatatatacaatttaacatatgtgttatatataatatatattatgtattgtatattatatattatatatgtaattatatataatatacaatacataatatatattacatattattttattatatatttatattttatatataattatgtatgttgtatatatttatatttaatacataaatatatgttatacataatgtattatatattatatgatatattactataatatataatatattatatataacatatataatatatgttatatataatatataatatatagtatattatagtatatactacagtatattaatatataatatattaatatataatatattacataatatataacatataaaatatgtatattataatatatataaaagatatgttgtatatataatatatattataatatataatttatattatatattacatagtaaattatgtataatttatatatatataaaaatatatattatttttctctaattttctctaatttgatcccacactcagtggcagcagcatccaggctcatgtgttattggcgtcacccaaagctccatgtcttgtttcctgatgctgctgctgctgcttctcagtggactccctctcacttccatttcaacacgttcacatctcacctgcacggtgcatagtccaatttacatgctatcagttccagaaagaccttctcgataatttcagctttaaatttattctgcttcctctgaattcactaaaattttccgattatctatatttttattttattttattttattttattatttttgagtcagaatctcactctgtcacctaggctggagtgaagtggcatgatctcagctcactgcaacctctgcctcccaggtccaagcaaatctccctgcctcagcctcccgagtagctgggattacagacgcccagctaatttttgtatttctagtagagacagggtttgatcatgttggccaggctggtcttgaactttaacctcaagtgatctgcccacctcggcctcccaaagtgctgggattacaggcaagagccgcctggcccggcccggttgtccatattttaaaatatatgacttccctgctgtactcaatcccacaatacacacatagtacaacgtatgggaatacgccttgaagacctatttgtagatgactggagaaaaataattggttagaaaaaaggacagtgtatgtttggtaagtagttgttgattctgacccattcgaagataagcaggtgatatcatcgataagctgaagagaagagccaggcagtgggaaatatctttgtttataaaggtaggatgtgctaccgtagcaaatggaaaaatatgagtgagaaaataaacattcccctcaaccccacttcccagtgatgaacacccttcacctgtggctggatatcttttatctgagcctttggtaaatatttgataaaattgcaaaatattacctacatattatttttggtttttcccaagacttccctcagagtgatgtcagcaacagttttaataaggggggaaaggctttgtcctctgtcagaataaacctcataataacctttgtaaaaaattgatttgtataacattttgtaattctcatcggaacatactgaaagatgtttccgtctggccttatttttggacaatgggaaatatatttatgcaaatatctccctgaagtttctcatttcagcctcatctgtgaaatgtgtgcctggctggccagggcctccccactccacagtcactgtctgggccacgctgacatagctgcggggtggaggatgctgactctggccggtccttgaaggcagccaagggctgctgtgcagccagctgccaacctcaagtaagcgatgctttgggcagaggagcccttggattccctgcccttttgcccttgacttcaaccgatgatttgccattgagctgtgataggctgctttatgctgagttataagcgttccgggccttttagacattattccccatcacttttctagattcttcactgcaaattacgaagaagccacaagcgtacatttgcaataggaattagaccactacctcagttctcttaaaattaaagctgttgcagcctagggagggggaatcaccaaaattatcatctgattaaaccatgttttaactattgctaagaaactcagacattttatgaaacttgccacctatcactctggaagttctgtctacccagatagcttcgcccagtaccaaaatgacattccactgtcagcaaagatgcccgcaactttagctttgaaaacatccatttagtaatcatctgcatgacccacttcagccacagcgttttcccataaacgatggctgtgaggagcacaaattgtatgtgcctccgtttcctcagctgcacgatgaagataattatatccatttggagaactgttgtgaagtgtacataaaaattatgtagatgaaaggatattgtgaacagtgtaaagcaatatacagatgtaatgcgtaaatattattgctcgtgggaccttcgtgattccctagaacctgtagctcatttcccttctaccttatatgcatcaggactcctcatgaaactttaagtaaaatacttccgtaattcaaagggttcactgtgccaaattgatctgattgctgattgaaattcatttgtaatatcttagttttacagattcgttttaactggaaaattggcaaatacaaggcagcttaaagtatcaattacaagtatcaattatagtgattttgctttactatggaaaatttgctacaagttctgttatagtcatccttcttaaaactcaataatcagagatttgttcttgatttaattgaagatgtagcagatgagaaaaaccttttctatgcaactgggagacttttttttttttttttttgagacggagtctcgctctgtcacccaggctggagtgcagtggcgcgatctcagctcactgcaagctccgcctcccgggttcacgccattctcctgcctcagcctcccgagtagctgggactacaggcgcccgccactacgcccggaactttttgtattttcagtagagacggggtttcaccttggtctcgatctcctgacctcgtgatccacccgcctcagcctcccaaagtgctgggattacaggcgtgagccaccgcgcccggccgcaactgggagacattttatatgccatgaacaacataaattatcacagagggtagaagcacacaattctaagccaaaatgtactatagaagcaaaattatttttaaacaattgctgtatagagtacccacatctgttatttatcatttgaaattgtattgctttggtaagcagtctaatcaatcaaaccactatgttccctaatcccaatgaagcattcttctcttacagaaggaaaatgggcctaaaaaagagataatactttagcagctattttttggattagaccttttggagtcttgaaagggagcctcaacacatacataaataaggtgaccgcatatctgaaaaagaagagaagttgaatgagagggatgataggagagaagaagcatgaaacaccagctgctctcatagcatgtgatgtagctgcattcttcactgctaaattaaaaaacagattcaggcttctgggcttgaggaggctgcagttaggaatgaatgccacgtgttcacttgagctcgaacaaagaagaggatatgagtattgaacactgttggctcagctatcggctgtttagctgctatctaggccaagggatagagacagtgatagtgtccaacatgtagaagagaaagttagaagatactaggaatactcagaaaactatatcatcggtcattgattgagttactggaatcatttcttcctgtcctccaattctatcatgcccaagagattacaccacaatgtgctgtacgtgactgtgcgtgctgaacacgcctttctacaacaatgacgggttttcttctgtcctctgaatattatattatctaggaatagaacatgaccagaaaatagatccagtggaatttttttttcattgttccaaatttaatttcagcatcaggaattgagatatagaaaaaggaaatgaacctggaaccacaggcaagagtataatattggaaaaggcccccaacagtgacaacaccatcttgtaaacacttacgaagcttggtcctgtgaaaataagcatacatcacctcccctgctcccccagctcctcccgtcgccattagttcttacatgccgtgttttccttatctattgccttatcattgtgtgggttatgggtttgggcagggctaggtcaggggatgtttctactctatatggcgttgactgaggttgcttggtggtgctcagctggtggaggggctcacatgtcaggcatcttggtaggtgtggctggaagaatggattccactatggttgttgatgggagatagacacatggcctctgctaaatgggcagtgtcagagctcagggcacccagagagagtgatctaaaagacagggaatggaagctgcccatttttaggcatgagccccaaaactgacagagcagcacttccactgtcttctattcagcagagtagtcacagagtctgcccaggttcaaggggagaccccaccttacaataggaggagggcaaaagaattcatggccaccttcaattcttccatagtcctttctacacataaatgtagtgtctcataagcatacctgacagctatattttctctcacataatttattcatcacccgtcacacctgccctgcttcacccgcactttagtctctcctccaacactgctgaggggattttcccttcttactgataacaaggtggtctctagccccttagctttacttgttcacttcccaccagctcagctgattctgtgcccctcagtcctttccagctcccttcgtctgggtaattcctatttttccttcactgctcagcttctctaagaattcttccctccaaccctgccccttacccccactgtgccctcatccattcattcatgtgtccattcaattgtttgttcaacagatatttactgaggcactcataggcaccccagctaactacgggtgaaaaagagcataacggcaggtggggtgggcgtgctcctgaatctcagaagcctcactggggggcataacagcaggaggggtgggcgtgctcctgaatctcagaagcctcactggggagcataacagcaggtggggtgggcgtgctcctgaatctcagaagcctcactggggtgtataacggcaggtggggtgggcgtgctcctgaatctcagaagcctcactggggggcataacggcaggtggggtgggcgtactcctgaatctcagaagcctcactggggtttggctccccagggggacccaggcagtgttgtgttttagattcctggccacctgcacaccttgtcagcaccttcagggtgcaagcaagtccagccacggttagcaggctctagttctgtgagccctccatggaaggggtatttattttcttatgccaatcgttcaggtctcctcttgccgactctagtgtcagaggggaaaagagagaaatttcctggctcagtgaagctggagcaaagctttaccagggtgtttagtagctagggttggaattcaattttgagttttcctgctgtggcagttaaatgtgaagctttacattaccatttctctttcattcttctcagctatattttaacttgaaagttttttcactggtcatgaaagcaaccaaatgtaaggaaagtcaatacaaagttttaaaaatagcaacaaataagcggtctataaaatattgttataacagagtgaggtcagatcttcagaaataacatctattcccacctcagattttggaggtgcttcaaattttccatcttaagcattggtggaataagcacataattagactttagaacaggaccaaatcatatcctcattaaataaatacagttataaatgatggaccacatttgtccaacatgcatatcattttaatgtttgtaagtaataattctgccaatatggcaagccagatatcaacaatgtgtctagaagcgcatacaaaagagatcactaggatctgtgaccacctggaagggcatgtgaaaacgttcccatagagaaaggctaatttcacttaggacacaaacacgggaagaatttcaaagataagtatatcgcaaggagcatattccagacatggagaaatgcatgagtaacgcacgatttgaaaacaggaagtatttaagatacattaaggtccaagcaaagcactaaatgggaaatgaggcttggaaaggcaggtgctgtggtgaggattgattggaatcccatcctgatgagtttggttgtagtttagaagggaatggaaaactgctgaaaagtttggaaaaagtaggaatgtttttacagctatgattgaggaaggttaatatgtcagtcatttatagtctgaactggggtgaagagagatgttataagaataccatagtggtctaggaaggaaataatgagactcgcatgaaatcagtgaccacagtagaaaaggaaaggaattcatgggaaagtcattgaaggcagtggccacagaaagattgtcagtagttcatggtggggttggtaggtcgaaggggttggcaggtgggtagtggagctaatgaagagagagtagtgtcagaaaagtctccaatggtgagaactttccatctgaggacacaggagaaggtcacaccatttaatgcaaacagaactcactatttatagcacatagaacttagctggggataggaataggatcgataatgaatgtggctttttacttcatatgtttgttcattcaaaaataattttgtgttcttctttgtgacaaatcgtgtgccaaaatgtttggcagtggagagatgacttacccagatccgtcgaggagaacacagataggtttaaggagaaaggcatgaagcatcttgagcaagtctcagaatccacagagtaacagaataagaaagacacagctcctttaaaactctgaatcattatttcttgctcactttgtggctgggactggatgggatcattgttatcatcttatatttgttgagttattatttgccaggcaccaagcagtgtgtgtaaagaacctattatttagttttcagagacactttctgaggtggatactactgactggtccatattttacatgtagaaactgaggctcagaaaagatgaagaacttgcccaaggtcgctcctctagtctgtctctgttcctgcaacagtaacgtagtgataacatagtgaaggcacagacagtgtttaaggtttgagcccagtgtctatttaaactatattattgttgtttctaacattaggcatctataggatactttgtttcctgatgagaacaaagctaactcaacttcatggcgtgtgaacagataaccagccctcctcaattctgtgctttaactggctaagctaattactgatatgttagtattctatggtacccctctactttcaatcactcagtaaaatcctgatggctgggattatctatacctttgccttgaaagagcataccaaaagccgcttttgatttaactataaaaggggaatgtataaatatgtcttttttaagcacctttaaaacaaaatattgatgggctgggtgcggtggctcacgcctgtaatcccagcactttgggagactgagacaggtggatcacgaggtcaggagttcaagatcagcctggccaagatggtgaaaccccatctctactaaaaatacaaaaattagccgggcgtggtggcaggtgcctgttatcccagctactcgggaggccaaggcaggagaattggttaaacctgggtggcagaggttgcagtgaggcaagattgcaccactgcactccagcctgggtgatagagtgagactccgtctcataaaacaactaaatattggtttctgccaccaggtacattctctaaaaccttaaactctgaccaatttcacaaaatgaccattaatttttaacttaaaatttttaattttttttattgtttagagataggatattgctctgtcaccaaggctggagtgcagtggcacagtcatagctcactgcatcctctaactcatgcgctcaggagatcctcctgcctcagcctcttgagtagatcctcccacctcagcctctttggtttctgaaaacaaacttgctgtagtttctgaagaattattcaagcctgtaagacctcaaagcctcatgtttagggacccagcaaaatgcccctagttcttacctgtgatacccaattttcagtcatacaccgaacaaaaggaattggaggaagtaaacacaccaccatgcccaactaatcttatttatttttttttttggttgaggtggagtctagctgtgttacccaggctgatttcaaacacctggcctcaagcgatcctcttgctttggtctctctaagtgctgggataccaggtgtgaaccactgtggctggtccaaagattttttgtagaggcagggttttaccacattgcctagactgacctctaacttctggggttcaagagatcctcccacctcaacctcccaaagcactgggattataggcatgagcccctgtacccagcccattattttaagaatattcaaatataagcacttagggaagatgagaatttataagaagagtgaggattgtttgcctgattgcaaacttcaaaaaatttgcttcttgaaaggttatagttaagaggtcacccagagagtccatcaggatgcaaaggaaatgtattgggaatttcgtaaaccatccacttccaagaaaacttcacaggaatatttgtgagatgtctaggtaaggactaaacaagggcatcactctaacaagcgtgcaacagcatgatctctgaaggtcgaacagggctcttaacctacatatttgcttttcttgagacagcagctcctctatcccaagagctataattagatctaactgctttctccataggtggctcagacactctacatcttttacctctgaaaaacctagatgatgtcagaatgaagatgtatttgtcttaccccctgtagatatgcatgcacttcacaaatcccctgtagtctggccacaatttggagtccttcaaaggttgggaggaatgtttagggtgtagagatgttagacaaagggctggtacttggaagacactctaaaaacaaacttgctgtagtttctgaagaattattcaagcctgtaagacctcgaagcctcatgtttagggacccaggagaagaccctaatacttacctttgatacccaattttcagtcacacaccgaacaatacgaaattgaaggaagtaaacagaaactagcagaactcactggcatctcagcttcaacctctcattacaaaaagtgctttttagattaaaaagaaaagtcacttttatggtaagattgttttgaacagcacaagctgtgcctagtgtttcctcggggcgcccatgaacttggctgtgatcctatcagccaaaaaactagcagagcccccaggggaaggggaggcgctgtggcccccctggggtccgcctccggaacaccctctccccgtgcttttaaacacggccaagttctgacttggagcagccataaaactctcctggtagcattttaaaggcttttaaaagaatgccccctcataatgtgttctattacagcggtgattgttattgttgttatttcccgctttgtagcaagagtgaaatctccctcggggtatcttgagaatggattgagaaactctgacgatagatcacagtagcccacttcattttctgctgtaaaggcaagttccgcctggcatctagtgtactggttggcaaggtcctcctctgaagaagtgattgttctaagaccccggaggcagagcgcgggaaatggaacagagtttgctgtgaaataacactatggaaaataaattctatttaaaaactaatgtgatcctttcccaattgtcttgtagattcattgactggaatgtagaattctgttccccaaatgaatcaacagtgccttgaatagagaaagacagacttttcccagggtaaatccctgacagagtgttatgttcacggcacagacagacatctgtcttcccaactctgttaggaccacattagatctgagacagcatccaccttttctccagcattcccccaaggcttaaatccggccgcatggctcctcttcgtcttcagcccatgagtcccaaactcagtgagcttttctgaacgcatagcatagattaaatgactacatccttttgctctcgtctccgttgtggaaccccagagtctgaaatcttgggaagctctgtgtcatttactgagtgtgatgcgatgccaagaccagggctgctgtacactgaatattgtgtaagatggattaaggcctctttcatcctgaaggaaaaaagggaagtttgccagctacaaggaggttggcaaagagaacagggactctttcagaaataaatctgattttgaaaaatagcatctcaggaagaaagccttttaaaaagctaggaagtaagataacattctcagaatactgtaaaataagaactgattttcataggatttgaatgaataaatcatctcattgctttagtcacacaagggagacggcagaataatagaagttgggagctggagagctgatacgagacctgttctgaccccatgagtctaagtgagaggcctcagaccccagctgctcctcgaatgcgtgtactttcaaatatatactgattactaaatgtatggggcttcttttggtttctattcttactacattttattttaagcttcttagcaataaataataataagtgctttgaaaacattaaaaaaattacagataattggaagctgtcattttcattagccctatattctctgaagagttctgcagtttctttaacaaaactctcaagagggaagtttacatttattgaatgcattctctcaaccaacactattttttaaaacttttaaattgtcttacagttgtgttgacttctttccttttgatgtacacttgaatgttaacacctgtagaaattactgtggctaccggcataaccaggattcaaaactcttccctcactgcaaatccctgcagctgtggctgtgtcgtcatctcccagcaccacctgacctggcctccatccctccagtctgtctgtctgagaatgctggatgaatggaaccatgcagtaggtaacctttaaggcgctccctttattcagggcaatgcctttgagatgctgtgcgcccgttgttcatccctctctgttgctcagtggtgactgttgtgtggctggcaccacagtgtatttgagcatttactcaataagggacatctgggctctcgtttttggcagttgcgattggagctgctgtgtacattcatatacagtgtttgtgtgatcatcggtctccatttctctctgttttcaaaattgagttgttttgtccattcttcattcttaaaacttttcttcggtgaccctcagataccccacatctctgcgtctctgacttcgtggttactttgttgggttcttcgtctttttaccttggaatatatcttttttatttccgtagttctcttatttcttttaattttattttcttgccgatcatatatccaagtacagtttttatggaaataaacttgaagtttaggttcttatgtttaaattacatttaaattagtaaggatgtaaatttttgtctgcccaaagtcagcttcttgaggcaggcacagaatagggtaatgaactttattttcccatgtttgggagagactttgtcagtaagtactctaaaaaagaaatccagcaatgggattgaggaagcatgaagtctaagctgggcaaggagggagctaaggacaggagggagtaatgaataatgaaaagttaggagggttaatggattgaaggttctagtagagttgaaaaattattcaagtggggttactaaagggattgagctgagggtatgaagtgatgatcaaaggatgctggaggattatgaagattatgggcagttattgataatgacaggcctacaccagtggttctcaactgtcacaatgtgtgaaaatcaaccggaaaaaatgtaaatatagttccccatgccccactcctagaaaggctaattcagttggttttggatgcaagagcaactcccagagattgaaaactactggtacatggtgcaaccccaggagaggtgggcaaagttgagaggatggcaagaccgtatggtgtgaggagaaaaagattgaggccagtttggatgaatgaatgtgttgtgagaacattgaggttgtaccgcattacaacagaagtgttggaaagtaagaaaatgacctcgatgctagctaggagggctgcagaagctgttaacatgaatgggtagaaggtaagcgctgacattcagctgtcatatgctgatattggagggagttaatgagcaaaaataatacccccaaatggaaggacacattgtctactgcctactggaacatgatattaatgttcaaatcacatctgataattaggcaaatggtcaaatttttcttgaaatttaataaatttctccattgatgtcaagcagttttagaaggtgggccattattgcatttttaaaccatatgttcaaaactaagacattttatttgaaagatttttaaacagaatatgcacttctatttccaagctccttaaagggtgaggatatacattttcataactgacacaattattttttaaaacaaattcataaaacagtggaaatattctaaacatctgtcttcaaagtgtttgctccagagttcaacttccttttataaaaaagatatttctatatctggtaaaaatcgcatcgaccttaatgggacaaaataactgtttttgttacttttctaaaatatctgctagattgcatttctaccggcagtcatttgatatcaaagctctacacaagtccaagtagcacttttatgcaaatttttaaaaacttctttcaagacacattgctatctgctggaaaatgttttcagagtaaagatatttgtattaatacattaggaataatataagtggtgacccctaacattgttgaatgcatctcttatacaatcatacatgacgaccttgaaaagtttcactaacttgctgaaaggaaaaatgagtaactctttcacagtactttcaacgtttatactgtgaattaaggagtgaaattctgtggtacaaataggatttatagtccctccctattttattccaactagcagaggaaagcctactgcattgttgaaggtttgtttttatcaaattaactacatcagtaacacttgtagcactttttacttctggctttaatttctttgctcagcatcttttttgtaagtcatacattgagtgaatactcttccagtactacctctgtaaccattcagcttgagtctttttctcaaatcaagatagttactccatcagtgctacagtaatccaacacaaccatcaaataatagtttttaatgcaagaaactatgttgagaccacatctcttacagtacaacttaatgctttatgaaaaataagtttttcaggtacttcattattgggagagaatatataaaataccatcagctgacacgtgtgtcaaacctggaatgtatttgttctaacatttgcttctttgcttcatcagtaataatttctacacatctttcttcagaagtttttgacaagcaaacatatcccaatttattgccacagtattttctttgtatgatttcagtcattttgttgcaatacggagaaaatttccctaaagtatatagcttttcttctttcacgattaagaaactaaataaatgaaacaagaaaaactcaaaagagacttctagaattttattattaaatattcattttattttatttttttttattttattattttattttattttatgttattttatgttattttattttatttttgagaacaagtttcgctcttgttgcccaggctagagtgcagtggcgcgatctcggctcaccgcaacctccacctcccgggttcaagtgattctcctgcctcagccttcctgagtagctgggattataggcacgtgccaccatgcctggctaattttgtattgttagtagagacggggtttctctgtgttggtcaggctggtctcaaactcctgacctcagatgatccgcccgcctcggcctcctatagtgctgggattacaggcgtgagccactgcacccagcctattaaatattcttgatgattttaaagcaccaaggccaacatcacaaactttggagaagtttgttttcatgttttcaatgcttagattttaattatggtttcaagaaattattaatgaaaaacctcaaagaattctatcagattgagatttatcagtaaatctgtatttcgtcgaattcatgcatgttctatttgtgtatcacatcatttatcattttaagttaaaaatttaattcttattttttacataatgtgatatgtgaatagaatatacatgaattagagcatagctgtcttattttcttgctgttcagttgtgcttatattattagtatcattttattttcgcagcttctttgcaggaaatactttaaagcacttgtttggagaagattcatttgttaaacctagagcatttcactcagttttgcaaatgcaaaccattattttatatccccacatttggagaggaaacaggttagcattgatggaggtaccattgccacctccttgtgtgatgaaaactcctttcttccctcctcaaacttgggacatagagtctgaatgatggagccagtgtccacctgcacagtgaatatcagtaattcttaacttcagtttatattttcaaaatttttaaaaattatatgaacagttatcctcattttttcttatgatatcccaatgacttaattcagagaatgttgttctacaggagggctcagacattctttttttttttttttttttgagacagagtctcgctctgtcacccaggctggagtgcagtggtgcaatcttggcccactgcaagctccgcctcccgggttcacgccattctcctgcctcagcctcccgagcagctgggactacaggggcccgccaccacgcctggctaatttttttgtatttttagtagagacggggtttcactgtgttagccaggatggtctctatctcctgacctcgtgatctgcccgcctcggcctcccaaagtgctgggattacaggctgagccaccgcacccggcccagacattcttattgttgaatagacagctaaaatgacaaatgaaacctcccttatctgctctgtgaacccagatagaagccagtcactgtggtttaaactagcacttcccatacgctgatgttcactcagatgccctgggcagtgaagaagcagattgaatgccttgggcatcttgaagaagcaggttcagattcagtaggtccggggtgaagcctgagaatatgcatttctttttttttttttttttagtttttcttctttctttcaaatcagctttctcatggttaaatgcatttataataagcttctagttaatgaagatgcagtaggtctagaactacgttcatgaatagcaaaagtttagaccaggggtctataaactacagatagcattttttttttttttgtaaataaagttttattggaacacagtcagcccattcatttatgtgtctagtgctattctttgctgcaatggtagagttgggtggttgtgacagagacctcatgacctgcaaaatttaaatatattcattatttgattctcatataaaatgtttgctgaccctttgtgtagacaataaatgtacatttcatatatagatctacacatggataacccgtctagactcattgactactacagattcagaagaggtacaagaactaatttcattgaatcaaattatgagctaaatcatgagtactctctgctaagtggatttactatttcaacaaaattagaaatgacagaaagcagaatttaaaaataaattacttgataaaagaatcaccattcgtatcgtaatctcacagttaaaatagagccctacatcaaaagttgcatatccatcattttaaggttacataaagtgaggtgaaggcctgaagcacttgagtcgaattatattaaatacataagagttggatttaatatctttctctagctaaatatgtcatagtagaatcttaaaatgaaactaagctgcaaaatgaaattcagctcatagcagtggtctgctgtgtattgtcataggccttgaaacttcattttcattctatataaactgatagacctacttaaatggttgaattagttgacacgacacatcttcacaaaaatttactgcattagaaacatgctaatgtacataaaaacatgagctgtttctttcatcagtgtgttttcatgaaactctaaaatacattagtgatatataggggcactgtgtccacgtggtaaataaaccctagaaggctgtacaaccagaaataaccaaccaagtaagttagttagtttcatgttagttgacagttagtttcatgttatgtttaatgttatattttaccgcccaccccacttcattttcaagagtaacaaaaagaaaatcacataaattttcaagagtaacaaaaagaaaatcattttaggctgggcgcagtggctcatgcctgtaatcccagcaccttgggaggccaagatgggcggatcacttgaggtcaggagtttgagaccagcctggccgacatagtgaaaccccgtctctaccaaaaatacaaaaattggctgggcgtggtggcgcgcggctgtaatcccagctacttgggaggctgaggcaggaaaattgcttgaatccaaggggtggaagtttcagcagcgagctgagttctcaccactgcgctctggcctgggcgacagagtgagactctgtcttaataaaaaaaataaaaataaaaataaattaataaaaaatcattttatgatttgctgcatgctgtgtctgtgttttctagttactactcacaggtagatataggtaaccagtctgcagtgttgtgtttcagatgtttctgccctcccctcccctccccaccttcccttcccttcccttccctttgtcagagtcttgctctgtcacccaggctggagtgcagtggcgctatctcagctcactgcaacctcagcctcctgggctcaagcctctgcctcctgagtagctgggattacagacaccaccttgcctggctaatttttgtatttttagtagagatggggtatcaccatgttggccaggctagtctcaaactcctgacctcaagtgatgtgcccaccttggcctcccaaagtgctaggatgacaggcatgagccaccatgcctggcctcagatgtttcctttctaaaacatgattaaaccaaagtttaggaaatttattttattcaattctattctctaacaaaaatgttattatctctcttacctctatttctgcctttctttatctttatctatatgtaaaggtaagttttaaagaaaaaatacctacctggagtttttttggtttttttttgttgttgttgttgttttttgttttctttgagtcagagtctcactttgtcgcccaggctggagtgctgtggcatgatcttggctcactgcaacctccacctcccggattcaagcgattatcatgcctcagcctcctgagtagctaggattacaagcacccgccaccacacccagctaatttttgtattttttagtagagatggggttttaccatgttggccaggctggtctcgaactcctgacctcaagtgatccacccacctcggcctcccaaagtgctgggattacaagcgtgagccaccgcgcccagccgtggagttgtatcttaattcaaccttcttcatccatcttcacatcattttgctttgatatggaaatgagaggaaacagttaaaacatatttgactccagtgactgtactctctcccacagtaagtgaaacttgagaagcctgagtttgatctttatgcagtttaactcccaaactcagagcccccaaaactgggataattgatgagaagctgactagaatggtcagaggatgagctcattgtgggagtgctgctttcctgcaggaaggcccggagggaagctgccgcctgggctggggaggcggctcactgcctgccgcagcctcccctccctggagggccgcaccacctgcctgattcttgcaccgcacgcccccgccccgcccccatgccgttgctgtgatcaaagtgtttactgctttgacatcagaaacgatgccctttcacctgtgggaaaatgacaacataataaaatagaataaaaagtacaaacaaaaaggaagtcaggaataacaggtgatgctgttatttacataattcaaggtgagctgttgagctgaagttccaaagcacaggaatggacatgttttgtttggattttgtattgtgtttaattttatatttgctgtttctattctagaattgaggtgattaccaaggctctatatagctattctgaataatctgctagctatccgggtggttcatcatttgcccaccaacagttttaaattttaaaactcaggtggggggatgggcagtggtggcagtttcagtttcccactctgccatggtgcctgtcctagctggccactgcattccctatcagcatcagaaaagagaaaggcctagaagatgctccagaacctctggacactagtgggtttgccatcgggagcaaaggagccacgacttctgtgttgtccgttttcagttgccctttctgagtccaatgtttttgtaaagcgggacaatcatgcttagtcctttccacccaccccagtgtcaggaggctctaatgagttgctgtaggtgtatagtctgtgaaatgtaaccttattgttgaattccagttttcttagagacgattaagtatcatttccattgctctgagttgctgaccatcagacccatggggattgtacgtatttgcaacgctcttcccatttgtcctggccccttaccgagtgcaggagggaatgcatatttgcagtgggattcatggaatctggtcgtgtgtgaggaggactgtggtggtcgcagccctaaaccactcagccccactcaggaaacacactgcactcaccggacaggtccatattcttgcattagcctctcatttttccgacgcttgtagtttacacataattcccactctgtgtaccacctctcccgcaaagaaaaagggtggcagggcggaacttcctactcccctggcaaacccggattggattccaacttccacatctgttttcagcagttccctggctgctgatgcgtctccacacagggggcattaggatgacatgtgtccctccaacatctgttttccagggaaacttgtttcaaggtcttcgaattctgtgggaaccctgagtatggggtagagggctgaagatgtgcagaggcattggtgaggccctcctttctaccctttgtaggttctacaagtgcagtttaaaggtttcatttttacatgaaaatatgtctttaactatgaaagcttagaaactgaaaaaagcaaaccccacataactagttttctggaggtactgtttgagttaactaatcaggtgttggggaaacaatctcccacgtccttataaccctgaacgtgctggcggaatctaaaggggttcttgggtgctttttcagaacaagggccgctgctctttccggctgtcttggaagcacagattaagtttcttgccttttcccgggtcaccaccgactcttcaatggaaatgaaaagcaggggaaggggaggtagtgcccaggaagtgcgttcttctcatgatgcactgggcttgaggaatataagtgggcctccttgtaggaaaagctggcttcccatggccggtggagaccaagccaggagcagccaaacctcccaccccacctcgtgggccggtgctcctccccaggcagggtggctgtgaccgcactgtctttccggggacatgtataaggtaatgccctcatatcccacttgcggagaagaataccctaatactgtgggggaaaaataacgatgcagagatgtagatagctgaggttatataaattacccatatacttacatttcctaaaatgaagataaatatgatcatatctctcagtgccatagagctttacatttacgctctaaatatgcatgttcaaaatataattatgtgaggatgaccagaaatagaaatttttattatatatcttagcacatgttatcgaacatggaacacatgcaccatacacatatgccatgtggcataaggaatttttgttttgtgaatgatttttgctctgaaaatataaaatattgaaattcattgtctattatcattttaataagatattttagaaatagcagtatctacatataccattgccatgaatgtgtttttctaaaattaaacatgaaaagagcataaatatgatacatctgaatccccaagttactgtttatatttcacatagtatcagactccaagcttctttgctgaggaaccatatattttgacagaatttcctttattctgtgcattttcatctacttctaatgtgcatatgcctaaagtgtagaaaatagaagaaaatggcatgctgttgctaagtggatgtcctacagatctgaaacaaaaaagaaaagctttaaaatacactgtaattatgtaaaatggtgtgattttactttgattatctaaaataaaaattagaaggttgaaaatgaaaaagactctataacgataagtttcagtgtgttttcagagtatcaagtttctaacattaaaaaagtccataatgctcttttataaaccctttgacactactcccttcaatttcatagaaatatcataatgggctgggcatggtggctcacacatgtaatcccagcactttgggagtctgaggtgggcagatcatgaggtcaggagatcgagaccatcctggttaacacggtgaaacctcgtctctactcaaaatacaaaaagttagctggtgtggtggctcacgcctatagtcccagctactcgggagactgaggcaggagaattgcttgaacctggaaggcggaggttgcagtgagccaagattgcaccactgtactccacccagcctgggcaacagagcaagactccatctcaaaaaaaaaaaaaaaaaaaaggcagaaatgtcataatgaccatacagaatgtccctgtcctggccacttcccatacacttggtaatcatttgctgatttacctagagggtaaaagtgtgagctcaatattcttagtccttcaacccatatttgactctggtgcaatgagaacattgcatgtgatgttctcatagcttcctagctcagttaattagcagtgcttcctaacttaacggagaatcgcttggggagctgtgaaaatatagaatctggagagaaatgctaatgatataaggtttggagcagagggtaggaatcggcactttaaattcctgcctaggctgaaaaagataagacatgaaatggtggtaaggatgaggagccactggaactctcaaagactgactgtagaagtgtaaattgatacaacaaatttgtgcttgcatctaccaaagccgaacatctgtctgcctaggacctttcaattccattcacaactatatacctattagaaatgcatccatatcttcaccaaagaggtgcaagaatgtttgtaggagcaccaaagaatggaaatctcacaaatatgttcatcagtagtaagatggacaaatatagtatagtcatgctttgggattctctacaaggctggctttggggtctgccacctttgagttgcagagggccctgcactaaaaggaccctgggcttggtttaatgtgctgctgtcactatcttggaattcttgatttttcaacaatggccttgcattttcatttcgtaatggcccctgcaaattagtagctgatcctactataaagtaaatctcactcagtgttgcatgagaaaattcaaacacaaaataattcgtactgtgcgatttcaaaaggaagaaaaaataaatccttagtgttgaaaatcaggacagtggtcggctctgggatgaaaggggatggtgattgggaggggccactaagaaaggtttctggggcgcttaaagcattttatttcttgattcagttcctggttatatgagtgagtttccattttgaaattttattaacaggaaacatggtttacaaatgtttctgtatatacattatacttcaatagaagattacattttaaaaatttatttctttctacttttgacatcgagccgactggagcaactcatcggttgtaatcagcaaatacgtttcattttgatttggagcatttactctttccccattccgagccactagcttcatagctccctccagccgactgtgtagagaatccatggctctttgacacaagaaactggccagcagagaggaagaggctgacccacccttcaagagaacacctccaagtgtcggccatgggatggcttagctgttatcacatcccttttgcataaaatgagcccacccactccctcattgagcgccatactgcatatatgggagtgtgtcactgtctacacgggggaatttaggggaccttacaaggcctgtccaccccacatgccatcctagcaactgccagggggcttcacattctctcttcggtcactcttaactaaagctctttttaaaatgcaaatatgggccgggcgtggtggctcccgcctgtaatcccagcactttgggaggctgaggcgggcagatcatgaggtcagtagatcaagaccatcctggctaacacggtgtaaccctgtctctactaaaaatacaaaagaaaaaaaaaattagccaggcttggtggcgggcacctgtagtctcagttactcaagaggccgaggcaggagaacagcgtgaacccaggaggctgagcttgcagtgagctgagatcgcgccactgcactccagcctgggtgacacaacgaggctctgtctcaaaaaaaaaaaaaaaatgcaaatatgtttccatatttgcattatcagcctttagtcttgcttaaaatagtcatgatgtaggccatgaaatggcaaaatttggagaggtgtttccctggaggggccatggagggcagtggtgagagctctgggatggtcaggaacatgagcccttcacaggagcctgaggctgtcctcacctagcagggtccagacaggaggaatggggccgccgtggctggagtgggggacaccagtgggatttgggctgcttcacagtttcctcctctatgactaccactgtgcacacctgcatcagaaatgaaggttcaggcaactacgtggcttgaaaaagagtctctgtgcaagagggaaggtcgggactacatataggattcaggcattgaatcatttgcgtccattgtgatggtcaatatatcctttatcaaaaggacctgatgctcagaataggtctctagattgcaaatgagcagttctagtcaagaagtatgaatacttctgaaaaatggcaaatcaaatatttcaataagaattaaattttaatagacttgacattttgaattgaatatgaaagatttcaatggtttccagtgggtattttttaagaaggagggagggatctttatcagtgtttgaggagatcaattagtctataaaacttaaaatattctacagatactggcttctaaacatccaactgtgataggagaatagaaaaaataatagtagaaaataaaagaatattttcaaaatcacatacatgttgaaaataataggatcttaatgtagggatatattaatcttggatgacactacacactttttcataagaaaagtgaaaataaagccgggcatggtggctcacgcctgtaatcctaacactttgaaatgcgaaggagaaaggatcacttgagctcaggagtttgagaccagcctgggcaacatagtgaggctttgtctctacaaaacatttaaaaaattagctgggtgtgacggcatgcgcctgtagtcacaactacttgggtggctggggtgaagggattgcttaagcccagaaggtcgaggcttcagtgagctgtcattgtgccactgtacttccgtctggacaacatagcaagactctgtgtcaaaaacagaaaagtaacgatgagtaaaaaattattggcatccaaaaaacaaaaaatggaaagacaataatctcaaaatcaaggatgatgggagatattcagtaatatagtttaagtacccagaagaagcagtgtaataatcaatatggcttaaaagaaagcaaaaatgttaaaacatttatatttgtttggtaactaatgagacaggaaaagcaatgacataagatatgtgtctttcagcacaaaaatattaaaccatttatatttggtagctaatgaacaggaaaagcaatggctgaagatatgtaggtttcagcacatcctctgatactcctgccttctgagagtctttcactacctgggaatgtaagtctcaggtcctacagtgttgagtgaaggtcaaagtcatgggttacataacggcacccatggaacatctggtaacatcctgcatggccccagtacttatgagtgggatgccagtgaggggaggatcataggacatgagttcgaggtcaagatcctgtgtctcactttactaattatgtcaccacgggcacatttcctcagagcagttaggtgaatgctgacagtcatttccatgccattgtggccttggggtcccacgtgaaatactaaaagttcctcctgtgtcaaaacggacagagcctcttctaaatgttagtctctcatcagatccccattcaacaagagggagatttgtgaggactgccatgatacctcttattgccatagccgcagtgttgagcagagctcctagcccattttccatagtttcagcagttgacaggtgctgatgagaatatattcataaacaggccaggcacagtggctcacgcctgtaatcccagcactttgggaggccgaggcaggcagataacgtggggtcaggagttgtgaccagcctgcccaacatgatgaaaccccgtctctacaaaaaatacaaaaattagccaggtgtgatggctcgcacatgtaatcccagctactgggaggctgaggcatgagaataacttgaacccaggaggaggaggttgcagtcagcagagatcaagccactccactctagcctgggaaacagagtgagactctgtctcagaaaaaaatgtatacatatatacacacacacatatattttatattatatatgtattgtatatttttatatatattatatataatatatactttatatataatatatatactttatatataatatatcatatatactttatatataatgtatatactttatatataatatataatttattatattatatactttatatataatatataatatattatatataaagtatataatataataaattatatattatatataaagtacctataatatattatattatattttatattttatattttataatatatattatatattatatattatatattttatattttacattttatatatattttatatattttatatattatacattttatatattatacattttatatatcttatacattttatttattatacattttatatattatatattttatatatattatatattttatatatagtacattttatatattgtacattttatatattatatattttatatatattgtacattttatatattatatattttattatacattttatatgtaatatatatttatatattacacatattatatgtaatatatattttacatacaatatatattttacataatatatattttatatataatatatattttacataatatatattttacatataatatatattttacatataatatattttacatataatatatattttacatataatatattttacatataatatatattttatatataatattttacatataatatatattttatatataatattttacatataatatatattttatatataatattttacatataatatatattttatatataatattttacatgtaatatatattttatatataatattttacatgtaatatataatatataatatatattatatattttacatataatatatattatatattatatattatatataatatatattatattttacatataatatatattatatattatatataatatatattatatattatatataatatatattatattttacatataatatatattatatattatattttacatataatatatattatatattatattttacatataatatatattatatattatattttacatataatatatattttatatatattttacatataatatatattttatatattatattttacatatatattttatatattatattttacatataatatatatttcttttatatatattatatattttatatatttatatattttatatatagtatataatttttatttatatataaacaaaaaacaggtcttttaaaagtcttaaatatattgtttagatatataaaataatcgcaagcctctaggaaattttgaaagcttagaggaaagtgactatggccaagttaatagtaggggaaatagggcaaagatttcaagggaaacaggaattttttttgacgagagtcaaatgcttatcacagtggcctgccttctacaatcaaacgcctcaactggcagacttgttttgttgttgttgttgttttaattttgtagtttgggatataaaatagttcttttctttctaggaaggggatttccatttttttctggctgtcagtgtgactcgtgtctgatgcgcggtggatgctaccggcgattttcctttccattcctcggaatttctcgagtccgatacgcattgtatttagttcccgtcaggaaaagctgggtgtcggggtggtttttcgtgcctcctcttctgtctcgtgactgtgtatatttcatgcttgcatagtttccaaacacgccacagtataacttatgccccaggatatctaacttcagagtaagcatgttccaaacatggagcgagaatgagtgtctggggtaggagagaccgtttctacagggaaggaccgggagaggcaggcccgggaaaggctccagagatggagtccctgagactgacgcgtgcttcgaaggaagagacacacactgactgcaactggggtgtgagtggaggtttgggggactcagcacagattcattgagaacgggcctttatttcattctgcattttcagccgatttatttcatcgatcccctgttccaagctcccagctccctcccttattatcagccagttttctgcttgacaaccagccacacactagctcgcatctaggttttttggaaaaaaaaaaaaagtcattactgtatgtcttacagccatcagttcacaattggacccaaaattggaataacttctggttaaccctcaggagaataactctatttgtgacactgggagagatgaaaaatgaagacaggtctccttctcctctgggattttgaaatataatataagagcctgggctctccaggaagcagagcctgaggcagagggctcaggtgctcttactccgttacagtcctagtcccaggacagaggcgggagggccggggagtgaagcagggaaactaggacactttatggagctggctgctgctaagcccagcagatggctttaatatgagggaccatggattaagcattgtgggtatcagtaaatgccctctgtgtgaccaggaaagcccagaacaggaggcaaagcgccagggttgatcagggcccacatggagttgaggacaggagcgcctgatgctggctatgaggtatgtctgatatgagggcattaattaagacaaatttatgaacagattggatacttgatgcaatggagaagatttgagaaagataaagcaatacaagtgtcctacataatccctagaggtattaaatgctgccctgtttaaatatataaatgcattctcagggtgattttagtcaagttactcaatggcttatggctcatcttctcaccttttcgaatctgtgcaggagacatctcctgaccttattctgaaaaataggacccccactcagctgctgcgtcctcccactgacgttctctgtccccaatcctgctgtgtagttcctcatgcacttacccttccatagcatcttatcgcacttgtttgtctatttattctctctcccactagaatgtaagctaaatagggctgaaatgcgtctgctgtgagccctgcaagaacacctggcaaaagtcgctgctcagtgaagagtcactgaaatatttgaatatgtaatgattcagatacctattttataggtttctgtgaaaattaaatgagaggattattaaagtgccccactgaggtttggcacacagaagacggtcagtgaatgctggagccgttcacgtcctcgtgcctgtggtgtgtcccatatgcaaatatacacgggagttttatagcacagatatgttaagtattctgaacacagactacaccagctgagaaatacatgcttaaaacccatgtttgatttcctatccatatccatggaagggaaaaatagccacacatcttaaacttcatatgatagccaccaaataccttcacatgtacaacttatgttttaaaaagtgtgtacagggagctttgtgctgtccaactgcaaggaagagggctctggctggtccagttccctctgctgcaaagcgatccctgagaatatcctatcattctttgtagagtctaggattgtaaaatataacactttttattatactttttaaagtagagtgcaacatcctcatttggaataatgtctaaaaactgcaccctgagttctaagtgtgtgcatggctttagggtggctgaggcaatagtaacacaagtttctctctgaagggcctttccaggtagaccccaaattaatacaaagtagggctctttcttcatgttccttaaatgactgcaccaaaagtaccatatggtttttctctatcacagacttttgggggccatgtctctggaagagataccatcatacgtctaatgatgtaaaataagaaacattctgtgatggtgtattttccaaaaaagaaatgattaaaacagctcccaggaaaactcatagcttactgaaaactctagaaataatctctatacgtttaaattgctacaaagtatctatcttattttccctcttattcttattttctctctcttattttctctctctctctcctcatcctcctcctcctctctcctctccccttctctgtcttctgcatctatcttctgactctgaagagtagatgattaccctatctctaatttcatcccccaagaaaatctctcttcagtatttttccccatgtctcatttaggcaaaagaactattccatgattcccagcctaactccccagagttctctagttacctctaaaaacattcttcataacaaggagacctacctatcaccaatgtccattgcaagaattaaagaagaggaggtccatgaaaacagttggcactgtcgctggcacataatatatggtcagtaattaatccttatcagttaataattaatcatttctctcgtattgcctttccttcacaggccagcaggatttttaaatagctctactgatatatttactcagtgattaatataaaatattgatagccttctgatcatgaaacattaaaaattttttttagtagagaagtaaataagtcgtgttaaatgtactctgactcatgccaacaaaaggaaacagtggcatacataattctaaaaagaagaacatgagataattatgtaaggtgtgtttgatttgagaatgtgggagacagcaagattcagctagctttgttctgtgtggcctgaattagaccaagtctgagtgcatgaaaagttaaaggacattgaaacacagccatccccttttcttcatgacccacagcacttgacatccgtatcactaatttggtaatagagtatgtgctgagctgtgggggggcttctgattttgtcattttctttgtaccacttttcttcccaattgtaggcactctgagaacagcccaatatcttaatattaggaaacgtacttctctgtctatgaccataccaccctgaacgtgcctgatctcctctgatcttggaagctaagcaaggtcggccctggttagtacttgaatgggagaaaatgtacttttctatcctctaccctcaatacatagatgattggtattttattttgttttgttggtacataataaatgctcaatatatgtttgttttttaagtaaaaaaggaagaaacaaaataataaaatgggctgaaatcttctgaaatcaacccatcagctgaattaaacctgtgtagattatcttcccacatgtagctagtttgtcctggtacataaactatctgaggactaccttcacttctccctttcatagacaattttgggtctcctgtatgtggcagaactgtggtctgccctgggaagaagacaatgaataagttggcaggaaaacaaaagggagaagacagctgaagagctctttcaaaggagggatccacaaggcttggtgattaagacgacgcagagggtgggtcaaggacagcatgtttgtgttgtgagtggaagaaatgtgattctcttgacagaaacagcagagtctgagttgaagcggggtgatgtggcttctaggtgatgcattcgttttaagtatgctcaagttaaatagaaaccattatactaaaaaatataatcattgtgaggttaatttcttcttggcctcgtatttatcagctcaaaacatagcacagggctcttaaaagcatgtgtatgggttgaccatcgcctttcttttattttattttattttatttttattttttatttgagatggagtcttgctctgtcgctcaggctggagtgcagtggtgtgatcttggctcactgcagccactgcctcctgagttccagcaattctcctgcctcagactcatgagtagctgggattacaggtgcacgccaccacgctcaactgatttttgtacttttagcagacatggggtttcgtcatgttggccaggctggtctttaactcctgacctcaggtgatccacccgcctcggcctcccaaagtgctgggataacaggcataagccatcgcgcccagctatcccctttaatttttaataacttctatttcttagcatgttctgctttagaaaaatgggaaaatgtggtttagttccagtgaggttcacattattatttatagactatttattatgccatttatagggcctgtgctggaccataacaatttttaaagtaattgtaattattttacactataaaatacaacacaccagccattgaagtctaaatcagtagaactctagtacctgctgcaagggcctcatcctgacaagtgcttttgatgacagcaagaggtaggccatgtgcatccaaatatttttttccctcctcataatgggacttatctgatgtataatttatattctactttgatttcatctttcttagccttttcaaaatgtctgcttagtgatgatatgctacaaatcattaagaggcctaaagattgtgcttctccacaaacagcctgtgctttaaggacaaattaagagcaaagtattaatttccttttgtttgttttgttttgttttagagacagagtctcactctctcacctaggttggagtgcagtggtgtgatctcagctcactgcaacctctgcctcctgggtttaagtgattctcctgcctcagcctcctgggtaactgggattacaagcatgcaccaccatgcccagctaatttttttgtatttttagtagagacggggttttgccacgttagccaggctggtcttgaactcctagcttcgagtgatccaccagcctcggcctcccaaagtgctgggattacaggtgtgagccactgcgccgggcccaaagtattcattttcaattgtaacaatcacctcttattttaggatcttgcgtcttataattgtgtatactatacgtaaaacaatagtaaattggtagctagttatacacgggagaagatagcagttgtaaacaaggatggaataatctcaatagtgaaaatgatcttagaaacattataatccatttccattatcttagaagtaaaagattgggattaaagaaattaaaagatttggccaggcgcaatggctcacccctgtaatcccagcactttgggaggccgagggtggtggatcacctgaggtcaggagttcaagaccagaatggccaacatggagaaacctcgtctctactaaaaatacaaaaattagccaggcatggtggtgcatgcctgtaatcccagctactcgggaggctgaggcaggagaatcgcttgaacctgggaggtggaggtttcactgagccaagattgtgccgctgcactccagcctgggtgacagagtgagactctgtctcaaaaataaataaataaataaataaataaataaataaatgaaagatttttcccatgattgctaatagttgacagataaagttagaataaaacccagttctcttgcttttgtgtcactcattatgatgccaaatagctctttactatggcaagtatttatctgcttatgtaattaatctaaacagacatcatcattaccaccttttttctattttcatcatcatcttttcatgtttttatatatctgcttttccataatttagaataaaacaaggtgagaggtcagcacactgaggccctctgactaaatgtggccagcagtctgctgttgtacagggcatgagctaagaatgtattttacatttttacaaggttgcaattctttgtttaaagaataatattttgtgatacatgaaaattatatgaaattcaatttccagtgcctataaataaaatgttgtcacaacagcatgaagttgagtagttgcagaagggaatatatggacctcacatgctaaattatttactatctggccctttctacatgttttacagaaaaaatgataataccacattaaggtaaaaaacagttaattctaagggtttccaatctcagttggaaagacaaaatcaactcgcaatatagaacagatccaaataaaataaagactgatgaaaaaaacatgtattccttgtccagatactaaaataatgcatggttcagacctggatcaaaatcgaggctcatcatgtgggcccctcactaattatgcttgagtcaccagctaatagagaactcaggccagcagtgatcccagtccaggtgggactctatttaaattaagctttcctcatcaccccatccatcctcttcagccagagccaactctagagagaaaacaaactgaggcctttcccagagcctgagctactttaaaaggtttgtttccaccagctcctccctgtccttaccccacatcctcccacacctactcacagcaatcactataaaaattgtccaggcacacctggttttattgccgtctatcgtatcgcacttggcagatattgtgatttttacagattgaaggtttgtggcaaccctgccctgagccactccatcagtgccatttctccagcagcctgtgctcatttgtgtgtctctgttacattttggtaattttcttttcttttcttttctttttttaaacagagtattactctgtcgcccaggctagagtgcagtggtgcgatctcagctcactgcaagctccgcctcccgggttcatgtcattctcctgcctcagcctcccaagtagctgggactacaggcatgcgccaccacgcccggctaattttttgtatttttagtagagacagggtttcactgtgttggccaggatggtctcaatctcctgacctcgtgatccacccgccttggcctcccaaagtgctgggattacaggtgtgagtcactgcgcctggccaacattttggtaattttcacaatatttaactttttcattattattatatctgttatggtgacctgtgatcagtgatctttgaggttactgttgcaattgtttgcagtaccaaaaaccatgcccaaataagattgtgaacgtacttgataaatgtgtgtgttccaactgctccagtgaccgcccatcaccacatctctctccccacccttgggcctccctaatcccagagatacaacaatattgaaataagaccaattattaataataaccttacaatgggctcaaagtgtttaagtgaaaggaaaattgcatcttacttcaaatcagaagttagagatgattaagcttagtgaggaagacgttgaaagctgagataggccaaaaactaggcctcttgctccaataagttatccaagttgtgaatgcaaagtgaaagctcttgaaggaaattaaaagtgctactccagtgaacacgtgaatgttaagaaagtgaaacagccttatcgctgatatggaaaaactctggtctggatagatcaaaccagccacaacactcccttaagccaaaacctaatccagagcaaggccctaactctcttcaattctgtgaaggctgagagaggtgagaaagttgcatgagaaaagtttgaagttagcagaggttggttcatgagatttaaggaaagaagccgtctacatcgtatgaaagttcaaggtgaagcagcaagttatccagaagatctagcttaaatgtttgatgtatctggctacattaaacaatagattgtcagtgcagatgaaacagccttctgttgtaaaaagatgccatctaggactttcatagttggataaaaaaaaatcgattcctggcttcaaagcttccaaggataggctgactcccttgttaggggctaatgcagctggtgactttaagtgggagcaaatgctcatttaccattaaaatcctaagacccttaagaattaggccacgttgactctgcctgtgctctataaagggaacaacaaagtcgggattacagtacatctgtttacaccatggtttactcaatgttttaagcccattgttgaaaactactgctcagaaagaagggttcctttcaaaatataactactcactgagaatgtacctggtcacccaagcgctctgatggagatgtacaaggacatgaatgttgttttcatccctgctgacacaacacccattctgcagcccatggatcaagaagtttttttgacttctaagaattgcaatttaaaaacacattttcaaagtgattcctctgacggatctgggcaaaatacattgaaaaccttttggaggccgggcacgatggttcacgcctgtaatcccagcactttgtgaggccagggcaggcggatcacaaggtcaggagtttgagaccactctggccaacatagtgaaaccccgtctctactaaaaatacgaaaaaattagccaggtgtggtgggcgactgtaatcccagctactcaggaggctagggcaggagaatcacttgaacttgggacgtggaggttgcagtgagttgagatcatgccactgcactccagcccaggcaacagtgcgagattctgtctcaaaaaaacaaaacaaactaaaacaaaaacaaacaaacaaacaaaaacaccttttggaaagaattcaccattctagatgtcattaaaacgattcatgattcatgggtgaaagacaaaatatcaacattaacaggagctttgaaaaagttggtttcaaccctcatggatgactttcagagcttcaagacttcagtggaggaagtgactgcagatatggtggaaatagcaagagaaatagcatgagaagtggagcctgaagatgtgactgaattgctgtaatctcataatcaaacttgaacaggtgaggaatcgcatcttatgggtgaacaaagaaagtggcttcttgagatggaatctactcctggtgaagatggtgtgaacattgttgagatgacaacaaaggatttagaatattacatacacttagttgatgaggcagcagcagggtttgagaggattgactccaattttgaaaaaattctaccgtgagtaaaatataatcaaatagcaccatatgctacagagaaatctttcatgaaaggaggagtcaaatgatggggccaactttgtcttcgttttattgtatggaaccactatagtcaccccaatcttcagcaaccactgccctggtcagtcagcagccatcagcgttgaggcaagaccctctaccagcaaaaaattaaaagctgctgaatgctcagatgatcattagcatttttagcaataaaatagttttaaattaaggtatgtacttttttgagacataatgctcttgtacacttaatatgactatggcatagtataaacatggcttttatatgcactgggaaaccaaaacattcatgggactcactttattgcagtattccctttattatggtggtctggaaccaagcccatgacagctatgagctatgcctatataccttaaagtgttaaaagtcttctcttggatctcaagcctgccctcccaccctgtgactttccacctggagtagaggcgggaagtgtagagattttcattcttgagccccttgcccaggtgtatggtgctgatgactgggttaattgtcatacagagattaccttcaccatcacttccaggaaatgtcatactcaattttgaaaaaccacatgagcaaatatctttctaaactcacttttcttaagagtaggacactgttgtacagtacacacacaggaataagggggcatacttgttaaacataaattatttctcagattttttggcattaaattaattcttttcatgtttgtcagtcctgagcagattgataatttaaaaacgtatacacaacaacacagaatgttttttccctttttttttttaataaatccaaggaacatggttttccttttttacaaagtcaagggaatgacaaacagaaaaggagaggtctgtgtcaaagtggcattttctttatcttgtggaataatcttttatgttattcttctgtctcaaaaattgaatgttctttagtgataaatgcattatagagaagaatatcccaaaacagaataatggcaagaaacagttttcacgttgtaatctcaagcctctctttcaattgaggttttgcttattttgagacattttgttgttcatatgaacacaaaagcagcttgattcttcttgatctttatgtttaggtgaaaatcagttcatcctggataataattttaagaatttgagaagatctgattgtctgacatgtgtcaccatcttaggactgttgcaatatgatcatggtgtcttgtacctctgacatcatagtctttctcttaaaaaaacaaaccaaacaggaaatagcttttacttctgaccacttcagagatagacgggtcttcgttgcttctgtgtgacttggactccttcttacctctgaatggcttggactccttctcgcctctgaatggaagggaagctgccaccagcctttgattctaagggacaaacctcccatttgtagctggacctcacagccatggtggttcattcctctctcttccacaggctcagtagaccaaaaggaatcttttttttttaccccgttactccaggctggggtcacagtaggggagctcatgggaatttatactcttgagatccctttggtctttagtccattcattaattactccttcattcctgtgcctattcacttattcattcatttatttctgtatttaaccttccattatgttaagctcagccaatgcagaggtgaataaagttgcagtaggaaggaaaactgctttcaccaccagccttactctctctgctcccacttagagttgccaaggctagaacaatttagggaatttcctattcgagtaatccccgacaagcctgactcaaaaaaggctaggagacttgtgcattcatttcagggaaagggaggaactaattcactgtagtgggttgaatagtggcttccaaaatcatgtgtctgcatccttggaacctgtgaatatgaccatatgtggaaaaagcgtctttgcagataaattaaggctcttgatttgagtcagtcatcctggattatctgggtgggccctaaatccaataacaaatgtccttagaagagaagatatgaagacagaggcaaagattgcagtgatgtggcccaaatccaggaatgccagggcagccaccagaaactgaaagaggcaaagaatatattctcccatagactcttcagagcaagcacagtcgtgttagacttctggcctccccttgataggagataaatttctgttatattaaggcagcaagtttgtgatcattagttgaggaagtgacaggaaacaaatctagtcacccagcttcaatatcagctcaagtggaagttcttagaatatttttcaattactatcaggtttttgaaagatacctcacatttatatcttagttgaatggaaaaaacagattgtgagacatttcaagggacagttggtaggatttggggattatctgcatatgagggagaagaaaaaggggtgcaactgacgactctaaggtttttttttttttttttgaatgtttatactttttaaaaaaattttacttttaagttctgggatacatgtgcagaacgtgcaggtttgttacataggtatacatttgccatggtggtttgctgcacccctcaacccatcatctaggttataagccccacatgcattacgtatttgttctaatgctctccctgcctttaccccccattgcccaacaggccctggtgtgtgaagttcccctccctgtgtccatgtgttctcattgttcaactcccatttatgagtgagaacatgcattgtttggttttctgttcctgtgttagtttgctgagaatgatggctttccagtttcatccatgtccctgcaaaggacacaaactcatccttttttatggctgcatagtattccatggtgtatatgtgccacattttctttaaccagtctatcattgatgggcatttgggatggttctttgctattgtaaatactgctgcaataaacgtacgtgtgcatgtgtctttatagtagaatgatttataatcctttgggcatatacccagtaatgggattaccaggtcaaatggtatttctggttctagatgattgaggaatcgccacactgtcttccacaatggctgaactaatttacactcccaccaacagtgtaagagcattcctttttctccacagctttgccagcatctgttgtttcctgactttttaataatcgccattctgactggtgtaagatggtatctcattgtggttttgatttgcatttctctaatgaccagtgatgatgagcttttgtttatacgtttgttggtcacataaatgtcttcttttgagaagtgtctcttcatatcctttgtcctcttttgatggggttgaactaaagagcttctgcacagcacaagaaactataatcagagtgaacaggcaacctacagaatgggagataatttttgcaatctacccacctgacaaaagtctaatatccagaatctacaaggaacttcaacaaatttacaagaaaaaaaacagactccaaggttttaaaactaggaagatgatggtgttactgaccgaaagagggagttctgttttagggctgtgatgaggcaacggtgtccaatgagttgttttagaaaaagtgagtgcgagatcgcaaatattgtaaaatctgatgttgaaaaagaagatttaagtgggatattaatttccttttcaagtcctttatcaccaagtgtcctagtctctacaattgcatgcatacatggatttcccttgttgaaacttatacacacttacccaaagaaagggtctgttgaatggaggtgcttcacagaaggaccacaacaaaggagacactcaacaagtatcagttaaatgaatgaatcaatacactcaaaaaggcagggaaagaaggtctttcttttcatcacaatatctgtcttttcgcttacttccacttagtactttttttaaatttgcagttaatattttcttaatgataaaatattttaaaactgtaaacttactattatacactaatagatgagactttgatttgtgaccttgaagacaacatgataattttgaagtgtcaaaaaaaccctccacaaaactagcttcgactgttatcacgagactagtagcaggcaattatactaagtcctgagctctactgtagaatattttaagattaaccattgttccgttcagtttttctcaggggaattacaccatagaattattattgccattattgttgctttatatataaatcttagtatttttcttgatatgaatttatttttctctctgggataaaaccatagttttaggcatagtttcaggccttctaacaccattagacatgcaagaagacggaatcccactgaataagcataaccatgggacctttacaaatgtcaccaacagttaagaagcaggactgtttttgttaactcttgtcacaagacatacaagaaatgctctttctctttttttttttttttttttgagagagagtctcactctgtcacccaggctggagtacactggcatgatctcaactcactgaaacctccaactccctgattcaagcaattcttctgccacatcctcccgagtagctgagattacaggcatacaggcatgcgccaccatgcccagcttatttttgtatttttagtagagatggagtttcagcatgttggccaggatggtctcgatctcctgaccttgtgatccacccgccttggcctcccaaagtgctgggattacaggcgtcagtcaccgcgtctggcctgcgttctcatttctagaaaaccgaaatgtgagaagagagaggtacgcaattagcacacgtggcctatttatttttgtctcatataatccaggatttggggcatgtgtgtgaaaactcttacggaagccttacttagtcaaaaagtatcgctgtggccttgtgtggtggcttatgcctgtaatcccagcactttggaaggccgaggtggtggatcacttgaggtcaggagttcgagaccagcctggccaacatggtgaaaccccatctctaataaaaatacaaaaattagctgggtatgttggtgggcacctgtaatcccagctactcgggaggccgaggcaggagaataggagaatcgcttgaacccaggagacggaggttgcagtgagccaagatcacgccactgtgctccagcctaggcaacaagagcgagcctctgtctcaaaaaaaaaaaaaaaaaaaagtacagctgtgctagttaattgaaaggcggcaccctgagcatactaagcattaaaaggccatgcagagctgcctccatgcctccaaccctctgccatggtccctaagagaagctcagggttcctcctcctctgtggggagcatgggttagaataaggaggaaggattctcaccgccaacgggaagagcatttcacccaagagaatgctgttgcaggctcactctggaacagaaagttcccgggctctgttagcatttataaagggaataggtgaaggtgggggtgggtattcagagagcagaagtctctgggtcacactagcctttaccatcttgatggttagggctgtttatagcacatcagagcttctccaagcctagtggcaggtccagttttcgtgcaatgtgatgacatgttaccgaaatctaagtttttagagtttttaacagtgactttgaaatcagtactatctggttgtccggctacaaatggagaaccaatgttaaatatgcagaggaatcctatttctattctgtaacctaacagccagtgtacatgcaagcagaaattcccgtaacagtttttgcttcacatatcatgtctcatgtgataatagtatctgaataggttatccttatggattcttagcaaatcattgaagcaaaagaaagctgtaactaaaatctcttacttgtgatcagttttcaaaaggaatcaactaccctggcaagcactttattatttttgttccattattagtacctgctttatgcattccttttgggaaacttaggtgtgagaaggaattatggcaaatatattttttaaacagccaattcataagtttcagctccttggccattagatacttgttgtctactgagtgtctttgcaccaacgtgataattggatgctacaacaaaccttgcctacctgttaccttgcagccatttaatacttatttggctgttaaggtcatgagtgatttgatctccatgaagttgtgtcttcctctttccaacctcacaccttagcagtaaactcgagctcactggaagtgatcattacttgaagtcacacttggatgactgttattaaaccagagaggagaaatcatgctacgtatagaaatggtagtattagtaacacaccaatgttgttattttttaaactgagttggccagaactgctttgaactgatattctgcttatgtgagctgtgtctcaacattttaaaagcaaactgatacatttaacagatacagacatatgggcacacccatacacataccccaatgtagatttgctagattgaaaatgtgggccatttaaaaaatatagtattgatttgaaataagtagtcagactagctcatgctgctttcagagtaggacacacctgttcctcagtgggtgcactgcatctaagccaggtgtcagcaaactaggatccatgcaccaaatgcagcccaccacctgttttgtaagtaaagttgtattgaaatgcaaccctactcatatgcattgtctgtggctgctttcacaccgcagtggtagagttgagccgttctgatagaggatgtatggtttacaaagccaaaacacttactctctgattcttcttattttttgaggcggagtctcactctgtcgcccaggctggagttccgtggttcgatcttggctcactgcaacttctgcctcccgggctcaagcgattcacctgcctcagcctcccgagtagctgggattacaggcacccaccatcatgcccagctaatttttgtatttttgtagagatggggttttaccacgttggccaggctggtcttgaactcctgacctcaggtgatccacctgcctcagcctcccaaagtactgtgccaggactactctctgattctttacagaaaaaaatgtcaactttttatctaagcaaatgcttatgttagccatgaccctgaagacagtctgacctctaggaagaaatatttttcagtatttatataaactctagtttatataaagcccagtattttagtacttgagagcttttattttatgttcttgagtagcgggaagcaagaataaagaaacagatgagtgattttggtgttccaatgcacctaaaagaaacaaaatacttaagagcttcagaacagggatgatttttaaatcatagaatcagaagaaaactggagatcaccttatactatgatgttctctggggagaagggaatacacatttgtagaaatatattgaatactctgttttatcgattacagtcaccatttatggtaaaaatgtgctactaaaaaaacagtatatgtaccttctaataaatgaaatatgatgttataaatttatatgaaggattcaaaaacccattgagtcaaattacagaaagcatatatcagcgcctttttttcatcctacagaagctctgtagaagaagcagttcattttcaatcttatttatttatttatttatttattttgagatggcatttcactctcattgaccaggctggagtgcagtggcgcaatctcggctcgctgcaacctccgcctcccgggttcaaatgattctcctgcctcagcttcccgagcagctgggattacaggtgcccgccctcatgcctggctaatttttgtatttttagtagagactgggtttcaccgtgttgaccaggctggtcttgaactcctgacctcaggtgatctgcccacctcggcctcccaaagtgctgggtttacaggcgtgagccaccgcacctagcagatctttgatcgtaatctggagaattattgaggcagagagacagagaccctgtgcttggactcatgctttcctagcatctaagtagcatgaaaagtttctcctctagtctgttaacctgatgaactacatacatagattttctgatgttaaactattcttaaatccttgggatgaaccctgcttgattctgcttttttaactgtacactttcttatgttagataatatttacgaaggatttttatatctatagccttatgtaaaattggcctgtaattttcttttcttacattgttcttatccagttgggtaacaagatattagtctcataaaataagttaggttatttttattatttgaagcaacaggtataaggattatctgtcaaatattattttaatggaaaaaatacaataaagaacagcgtaaagaaagaaaattaaatttgagcttaccctatagcataacattgttgtcagtatgaaagtgaacaatagtaatgttttaaagacccaatcaacagatgaggatttagcagcctgtgtttggagtactcttctaaatgctgtgatctcatcagatgaatggtggattatgtatgtgtgcaataagtaaatgaatcaatgatttttagatatattcagtcaattttaatagttacggtttatatccaaattctaaatgaagaagaaagctgagatggagatttgagaataaaagaaataagggtaggttagatgtctgatatatgaggtttcatatgtgtctccttgttaaccagtgtttcttaactggcagcatgttagaatcacttgatgcagatcttacaaatatcagtgcccaaaaccccaccctgatcatcgcagaaagaggttctgggggtggtgagcaagcagctgcatttttacaaagttctccaggtggttctggtgcaaggtgtgcattgtgagaaccacttttctttttctttttttttttcttttttttttttttttgagatgaagtctcactctgttgcccaagctggagtgcagtggcatgatctcggctcactgcaacctccacctcctgggttcaaggaattctcctgcctcagcctcctcagtagctgggactacaggcacacaccaccctgcccagcgaatttttatatttttggtagagacagtgtttcactgtgttggccaggcttgtcttgaactcctaacctcatgatccacccgcctcggcctcccagactgctgggattacaggcatgagccaccgcgcccggccgagaaccacttttctagatctagcagtaagacatgcgagtttttcactggtttcaagagaatcaagtatgtgaggaccaagagaacaccaggaataaattaatcatgctatggtgactgccttttagaagactgtcagtaatggtagtcttccattttattctttactctcttaaaaaaccataactacattagatgtaggtatatgtataactgtatgtaagtgcagttatatgtaggtaagtacaccttacctacttttcaaatataacctacaaacagctatatgtaggtaagtacacctacctacttttcaaatatagcctgtgatgattgtgggttgaatagacagaaaaaattactttttgcagctttcatttttggcggttgtccctcctgctgattcttcctgcctaacatttcatcacatatgcatttcgaattttcagttaatttttttctgttattttttatttttaatattttttaatcttaattttcatttaatttttagtggtttgttttttgtttgtttgtatgtttgtttttgatatggaatcttgctctgtcacccaggctagaatgcaacagcgtgatctcggctcactgcaacttccacctctcaggttcaagcgattctcctgccttggcttcctgggtagctgggattacaggtgcctgccactatgcctggctaatttttttttttttttttttttatgtagaaacagggtttcaccatgatggccaggctggtttcgaactcctgacctcaagtgatccacctgccttggtctcccgaagtgttgggattacaggcatgagccaccataccgggccaatttttagtgttttaaaatgtctgttcttttgtgttcgttgtcatagtagtctctcactgcagcgccacttgaaaccttgtcactctgtgtgcactgaatgggcatgatgggttagtaatgtctgtgggaaattcttagagctggggataaaagcctgtcttttgtgggttgaccacagccccatgccttctctccttgtcgtgtttctgacattgtgtgatatgaatgtttgtgagtaaagatctcctgcataatgaaatgatgtttgtaaagcaacgaggactttaatttccaaaggaattcatttcagttttccagagaaaaagtcgaagtaattttacctttgcaaactgacagtattcctagctctgttaagtagagtcatgttgcataccacaatttcagtttagtgcttggtgtaagtctctcatatactttagataaaagcaaaaacatattatcttaaacagtttaaaattgaatattgacttcaaaagcaattatatccaaatatgtaattgtctaaacttattctttggcttcttacagtctttcaaaacttatcttccaatgttattggactgtttattgaaactgtagccgcactagtccatagctatctatccgtaagcagtcatttgaataaaataaattgtattcagaaaactacatcccctaaaacaatattcacataaaaccagggtcaaatcactgagatacatataagaaagtaaaaacagttttcagtaaaagatcacattctatcagagcccataaatctcactccatattgccatattaatatcaaatttataacctccacctgctgtcttccaactttcagttctcaagttttcccagcaatataataaagtgattttgctactgaaatggacagcacttttccatcaaatatatattgttttaggaaaatcccagtgtctcttaaaactgacataaaacataaaaacaggccatggtgtgtgtgtcatctggtcccagctgtctctttcctgaggcactttgtagctcatctcatttctctggcctccctctggtttctgacctcagaggcccacgcggtgctcactctgaatcctgttaactgcacttgactcccaaccaaaactgttctttctcaagttttccaagtagatgttccaatttggtgggccttcttttttcatgatttttcctttttattccataccactttagagccattcgtcatctgctgacatacattcaggggttttatgtgtgcatttaatgtttcttcaaaaaagctcagttgctttacagccagaaccccatattgcttttctattcattataatacctagcagatcattggtcttgttgcaaattcttatcaagtttaccttgaattgagtgttgagcttctaccttgaaatcctaacattctgtgttctgctcttgctggccttcctgactgatgctttgtgattgtgtgtgtgtgatggcatatgtgtctgagtgtgtggtttagagacagagccttgctttgtcacccgcgctggagtgcagtgatgtgatcatagctcattgcagcctcaaactcttgggttcaagtgatcctcccgcctccaactcccgagtagctaagactataggcttgcaccaccacctggctcattttgtttctttgtttgttttttgtagagatggagtctcactatgttgtccaggctggtctcaaactcctggcctcaagggatcctcccatctcagcctcccatgtgattgtgttttatatttcttctctgtcttcctgttgaaaggttgtttatttaaaaaattccctctgtggctatcatcttcctcacagtaacaattaattttttttttttttttgagacggagtcctgctctgtcacccaggctggagtgcagtggcacaatctcagctcactgcaacctctgtctcccaggttcaagagattctcctgcctcagcctcttgagcagctgggaccacaggtgtgtgctaccacgcccggctaatttttgtatttttggtagagatatgttttcgccatgttggccaggctggtctcaaactcctgacctcaggtgatccgcccgcctcggcctccaaaagtgctgggattacaggcgtgagccactgcacctggcccacagtaactattaaaaacacgttatttgggccaggtgcggtgactcacacctgtaatcccaggacttcagcgggtggatcacctgaggtcaggagttcgagaccagactggccaacagggtgaaaccctgtctctaccaaaaatacaaaaattagccaggcatggtggtgggagcctgtggtcccagctgctcaggaggctgaggcacgtacgagaatcacttgagcccatcaggccgagattgcagtgagctgagatcacgccactgcattccagcctggacaacagagtgagactctgtctcaaaaaaaaaacaaacaaaacacattatttgtgcataatataagagtgattcttgaaaagcttctgaaacataatatagtaatcggcttattctcttttgtgctgctataatagaataccacagactaggcaatttataattaacagaaacttatttggctcatagttctggagtctggaagtccaagatcatggggcctgcatctggtgagggtcttcctactgattcataacatggtgaagacatcacatgggcaagagactgagagagagagagaaagagaaagagaaatgggccaaatgcatcctttgataaggaactcactcccatgagaacgacattaatccattcatgagagcagagccctcataacctaatcacctcttaaaggtcccatctctcaacattgttgcatcagggattaagtgtccaacttaggaactttggaggacacgttaaatccatggcaataaagtatcgttatttgtaagtactggggcattggaagatcacatgtattttcctacgatttcacagacaatccaaggcataaactcagttacctttaacatccccagtatttaaaggagattggaaactgggataggcaagtggttatagcattggaagcactgagagtttctcattccaccccacattagtatgactgttactgatggggagcattggtggtaacaggaggctgaatgcaaatggagtagaatgccagcaactcacaatgaaggaattagactaaattcctcatgagctttcaacacattcctgagtcccttattgtctcaagttttgctccattgcaagggaaattattactgaacgggaagaagcccttcataaagacaaacaagaaaaaaacttttagatatttctcctattttgtagagttttttttttttttttttttgagacgtagtctcgctctgtcaccaggctggagtgcagtggtgcaatctcagctcactgcaacctctgcctcccgggttcaagcgattctcctgcctcagcctcccaagtagccgggactacagccgcgccaccacacccagctaatttttgtatttttagtagagatgaggtttcaccatgttggccaggatggtctctatctcttgacctcgtgatccacgcacctcagccttccaaagtgctgggattataggcgtcagctgccgcgcctggcttcatagaattgtttaacctttcccttatgtttccctggttcattaaatatggaggactcattccacaagtgctatctcaaaattgttatttttcttagcagatattattaaaatatggataatagccatctactcatggctgtcttccaggagtcatataaatatgtgactagccagtgtccagtacctgtgacgccatagctttgtagtagcgtcagcttccctggctcccaccatgagggaaggagggtgaccgctggcatctttttattcctaactcagtaaatgtatattggctgcttactctatccttgggactgtgctgggctgggctttacggtagcgaaaatagctgacgcacatatgattcttcatctagaccaggatcttctgagtgtaaaagggggtgctggtaataattttgctgggacaattgacagaggtctggactgttccaagcacatcaggacttagaatctctcacccgcctcagatttgtctttttcaaatcaagttgctctccgttttttcctattctttcttaaattataagactaaatgtgaacccaaaattcgaattgaattctgttcactgttaaagacaaaatacagcagacgactgaagagtttttatttgggttgtgatcatggcgaggacattcattacaaagaaaaatctcaaaaggaaggagtttgggggctcctaaaggcaggtaaatcagtgcatggtctgtgaccctatgggagtgtgaggaaggtgggggcagggcttaacttgaacatgtgaggccagggtgggtttcggcaaacacaaaagactgaagttgaagaaattattattttttctattaaatgagtacaaaaaatggaataaataacaaagtagatgcaattagtttaaattacagagatcagaaaattgcaagtagaaataagcaggaaacattttaaaacctgtcaacacccattaagacaaaaaagaattctaaaacagttgaaatgttggcaggtacaacaaaaccatggcacctgtggactggaccaggcgtgggggtccgtcacgcagactaggaggtgcccttgggtttggcaatgtagagacccagaggaacaaactgaaaaacaagtttaagaaaaagaaggaagaggaggtagagagtctgacaaaccaagtgcaaacgagcagtatgccaagtaaagtcttcatttctgtagactggcaacctgaattaagtctagcacctcatctggaactgcctcgagggctaacagtcactgaggagtcattttcctttgggaactgggacacactttcctcagaaaccagtccctgcctgttaaaaatatccgtagtcaccaaggaccaccagaaaagcaggctcctgggtcttgtccatgcccaaaccagctccagaaagtgtaccaaatgcaaaaatgcaatgctttaaaattccaattagttttcaattcccatttccctctgtaacatcttcagcttagcgtgcatgtatcgtttcacatatcctctatggtctggaaaattcggaaacaccaaaaccatcaagagagagacctatttatgaataatttattatagttcttttgctttgaaaacctcttggcttctattagcataaccagggcctagttcagattccccagggaggtgctactggaattttttctcacgcattagatgtaagacatacccatttgggaaaaactgagacgtatttctaaaagacatacatatagatggagttgattttatcaaacgaaatcagatgaggtaagaagaaaatgtttgactgtgatttatatatcacgcatgttaaactcataaaatttaaaaaaccaaaaggaattagagagacacattttgatttccctatgataagaaaatgcattatatgataatacatgaaggtagagaaagcctttttttgatgctatatcaaattatccagatatttgtgacatcaaatcatataaattattgaaaatgtggaattaatatttcaatgagaactaatcctacataaatggtgaaaaattgtctatgaacattaatgcaaaacaatgacccaaaaagaaaaatacaacataaagaggaaaagaaagaaataaggcgaaatatgctgttatatcttgactttcacaaatgctaatgaatagtcctgaagaggcggtacctgacatccagtgggacagcctgggtgacctcagacaataattccagtctcttttggtatcagtttcctcacttgtaagataaggcggtgacctaaatcttccctacagctctaacagcgaggtcactgagagctccactacctcatattcctctcttaggcccctgtgtgcagagcaccagccttcttctaaccaaatgcacaggttttgtgctcagggcagagtttccattctgtatttcttcctctttcccaacccttgtgaaatagaatgtgaattccaagaagagaggacctggttcccagtcctatgcctagggtttatgacattacctggcacataacaggtattcagcaaatatttgctgagtcttgtcaacaattaattttgaaaatcttctttaacttttctaagtgatgcaccccggattcaatttttttactatgctaattttgcattaaaaaggcaaattctaaggtactaagtgggaaacaaataggaaaaaaaaaaaggcaaagactaaaatctaaaaaagtacaggtaaaatgcttagaaatcaagtgtttgctgcacaataatcctcttattcatgccacaaaatacccacccctcaaccacttgatgtagacagctgaggaggggagaggatgtctgcaaccttctctgcccttgggcaaggcaggacaaagttgcatttcttctgatagtctccttagagaaaatcggtagttttttgcatttctgtgccagctttttaacccattcaaacccacattcagtaacaaatttttttttttttagacagagtcttgctctgtcaccaggctggactacagtggcgccatctccgctcactgcaacctccaactccctggttcaagcaattctcctgcctcagcctcccaagtagctgggactacaggcacccgccaccacacccggctaatttttgtatttttagtagagacggggtttcaccatgttggccaggatgatctcgatctcttgacctcttgatctgcccaccccggcctcccacagtgctgggattgcaggtgtgagccaccgtgcctggcccagtaaccaaatcttaaatgacttttgggcctctctctgatgagattaataatggaatcaaacaaagctcttgtttaaaagtcttacagaccctggcacagcatccatagtctcatctcctcatggtacagtgatagagccatcattcctgcttattctaagtatgtggtgctgagaaggtgaacaatgcaaaatagattaaaaactaggttttcctcctctggaaggatatcaattatatcaacacaggagcaattacattgaggaattttctttttctacatgatggaatttggtaaggtgggacccaaatctggagacacaagacccgagtctcccacccacccaccctgaattgtttttcactcacgcagataccattttgtaaagaagcagtattgtcatgtgagcatatggtaacagaataattttatgtaagaactatgatgtaatcctttggatatacctgtattttcctcactggggacagggagcctgcttgggccctgtgctcccaacagcaacgggtaagaaatgcccactgctgttgggcaggtgctcaataaatatgcgttgaatgaatgagtgaacaaatctgttgcataaagagcataataattatctttcaagggctttagggaaattctaagataatctatgtaaaatagcctattacctggtatgtggtaaatacattatagttgttattggtattctgagtattaatagtaacccttgagaaaagttctaataaaattatatgtgagcaggacttggtcgctcgaatgaaagggagtgtgagacattggaagaaatatgtttctatattagaacccgcattagatatcatttcacagttacaaaacttctcttcacatgggatagatatcaagaaaatgagggataagtcctccctcatgttaactctcagcataacagccttggagcctatttttatcttttgttagatgagggaagttgggaccaaattcagcaagatgcaacaaaagacttttaaaatccactattgagcaatctctccccgttttcctcttttccctccaattgatattaataacctaaaatggagttggcacacggtgtccattaaactcatggaacacctcttcgtgtcggattgacaggtgctgcccaagccttcaccaggttgatgtggcgacagactcagtgaataccagcagcctccctgtcatggatcagatcaaagcttgggtctcttttacaaatgtcccattgtcctgaagaaactttgctctaagaagccatgtggaaacacctgatttgaccattgtctgagaatgacagtgttaggaagcttctttactgagatgtatatatctttaatgtctttacggaaactaagctaccactttaatcctagggtcttcattttctcatcattattcatgaatttaaccgaccctggctatgcaaaaattggggtgatttctgactttgtcctatttataattccttctactgcaaattagaatttaaaatcttgtggcacgtgaggacattttcctgcctccaatactgttcttggagtcagtcaaatggtgtgctagcatccttggggtcttgttcatgaccagctctttgggaatgacccacatggttttccttagaatgtcgttcagtgcttcctagacattttttcctcgttccacgtgaagacagtgatgatatttgtagggcacactgtggtggagagatactgctgcttctggacagacgccaccagcctagaggctactggccaggggctcttgctgtcctgggcatctactggtggcccagggtctcagagaattagttgtttggtccactggttgagcagctgagccacaatcccactttaaatgtttactgtttaagagttgattgattttcagtcagagagaagtaggttcaagttctgactctaccacttattaatcttatggtcttggccaagctgtttgaattttctaggcctctgtcccgctcatttacataaagctacccaactggtttgtacctgtgtaaaggactttctattagtaaacgctctatcaaggttagttcttgttatcatgattattatttagattcccagtactaattatagactccttaacttatgagatattccacagaacacatacgccaactccacggctgacatcagcattgcacaccaggaggcaggcaggcctgaagcgaagcgtgtgattctgcttccggggtgggggtggagggtctgtcctgctgccttatacccccttctgttttgcattgacatttcctcaacctctgaccttgtgaacaagaatcggggaaaggtggagcagcatgaatgccttattctgtgctgtccaatgtggtagcttctagcagcatgtagctctttaaattagccttaaaaattaattaaaattcaataaaacaaaaactcagttcctcagttgtggttcaacagccacatgcagccagtagccaggatatggacagagtagatacagaacattgccacgacagcagaaagtccaaccgtccagctccgtagagagaccctgaccatggcctttcaggcttagagtcttcacccaaaacccgaccacagggttcaatgttagctgtttaacaaaccggataatcaactttcaatcactttccttggaggcaaactattctactcccattctgcaatgttcatttctgcttttgatgcgactttgtaattttttttcagctaggtaacaaagggaaagggtcattgccaccattataagcgaggaatatattttgaaagatcttttagtctttaaaagtttaatattctttttgttcattttgcttcatgcttattaaaggtgatggggcaaaaattgcagactgagcactccacttttatgttgcccagaagttactgaaaattcttattcattatctcggctgctaactattctaaattttcttgttgccttaagcctcgggtccttcatctgcatcttcacgtaggcagaaaggctttcaagtggaattcacagagagggtgaggaccagagcctggagccttccacgcaggttaccatctccagagatcccaacagggatcctagggaggggagggagattcaccctcgatgcaaactgagtttgaatggggcaccaacatgatcgtagctgtactatggaatgaatgaatgcatgaatgaatgaatgaatttatttagagatggaggcttgctctgttgcccaggctgcagtgcagtgacacaatttcagctcactctaacctccgcctcccaggttcaagcaatttttctacctcagcctcctaagtagctgggattacaggtgcccgccaccatgcctatctaattcctttttgtatttttagtagagatggggtttcaccatgttggccagattggtctcaaactcctgaccttaagtaatctcccctccttggcctctcaaagtgctgggattataggcgtgagccactgcgcccagccaggaataattcttaaaatccacggattcaaacaaaataagcagaagaattttattcttaagtatccaagtgagaataaaaataagaacaaatgtggaaggtactagagaataactataactgctaatgactaataatcagataagaataatttgacctgattaaccagctgtctctcagagaagatggagaaggagacagaaggtggcttcagtggctctgtggttttgaggtcaggtatctgggagactcatgaggggctgttattcagaaggagagtcacggagtagacccggcttcaggataataatatagagtttggtttggggccttcacgggaggcttaaattatgcaatcctcttaaacttttctgactataaattattaacccttattaaccttatctttgtatttatctgtctgggtgaagccaatttaaatacagtagcaggctgtccctcagacttctctcctccaaggatcgcctgtcatacatagcactcctgagtagattaaagatgaaagttcgtttcagcagaggaaatagctgacaagatactgaacccattttggcagaaaacttaacattcagcctcaatccgctgaaactgtcaaaagagaacgtgcatcctcaggcagaataaagagaaggaagaggcggggtgcagtggctcacgcctgtaatcccagcactttgggaggccgaggagggcagatcacgaggtcaggagtttgagaccagtctggccaacatagtgaaaacccatctcaattagccaggcatggtggcaggcacctgtaatcccacctacttgtgaggctgaggcaggagaatcgtgtgaaccctggaagtggtggttgcagtgagctgagatcgtgccattgcactccagcctgggtgacagagcgagactctgtctcaaaaaaagaaaaagaaaaaaaagagaaggaagaggtgtcctcagtgggccagattcaaggggagaaatcagcaaggacatgtctctcttgcccatggctattttttttttttttttagagtctcattctgttgcccaggctggagtgcagtggtgccatctccactcactgcaacctttgcctcccagattcaagtgatcctcctgcctcagcctcccaagtagctgggattacaggtgcctagctaaattttgtatttttagtaaagacgaggtttcactatggtcttgaactcctgaacttaagtgtgcctgccttggcctcccaaagtgctgggattacaggagtgagccaccacacctggcccatggctcttatttttaatttggatcacccaggaaacacttctctcttatatgctttatgttctcatatttgaaagggggattttagcttttgtttaataaatgcaacctgaggacaagccgagtgtgctccttacatcttgttgtaaggagtacaggaaagaaatttgggttagtgcttaaaaattattcctggcacttgttaaagaacagtaaggcaggctttatttggaggggattactgcaatggggttttgcagcaggggaaggagattggactcaactccaaatacaataaggaaaaattggggatttgtagtccaagagcaggatgagacagagtggttgggggttgttggatagaaaattactcagaaggcaaagtaattatttgccaataggattcttgctgtaggcaggccgaggtgatcagatgtcacctggaagatggcagggaatgaagaaaccaatcttatatcaagggtgatcagatattgaaggtaaaccaacttagccagatcttgctaaaattgagggatgcaaagatggataagaaagtctaaaagtgggccaggcgtggtggctcacatctgtaatcccagcactttgggaggccgaggtgggcagatcacctgaggtcaggagttcgagaccagcctggccaacatggtgaaaccccatctctaataaaaatacaaaaattagctgggcgtggtggcacacgcctgtaatcccagctactcaggaggctgaggcacaagaatagcttgaacctgggtagtggagtttactgtgagcagagattacgccagtgcactccagcctgggcaacagagtgagaccctgtctcaaaaaaaaaaaaaaggaaaaagaaagcctaaaagtcatggcagataggaagaggattcagaagagcctgactaacgttgggtcaaggagagactctgtcattaggagatatgctcattccctcttaacctcctcaccctcttgctgtgcacctaatgggtttcatggagccttctcttttgttcctggattcatttattaagaaaaattgattccatggctttgctttgtgaatactgttgcaacaaacatatgcatgtgtctttgtcatagaaagatttatattccttttggtatacacacagtaatgggattgctgggtcaaatggtatttctgcctttaggtctttgaggaatcatcacactgtcttccacagtggctgaactttttttacaatcccatcagcagtgtataagcattcctttttctccatagtctcaccagcatctgtttttttttgactttttaataatagccattctgaccagtgtgagatggtatctcattgtggttttgatttgcatttctaaaatgtggtacgtatataccatgtggaataccatgtagccaaaaaaaagaatgagaccatttcccttgcagggacatgggtggagctggaggccattatccttagcaaactaaaacagggacagaaaaccaaataccacattttctcacttataagtgagggctaaatggtgagaacacatggacacatacactggaggggaaaaacaggcactggggcctggcagaaggtggagggtgggaggagggagaggctcagaaatcataactgacacgtactaggcttaatgcctggtgatgaaatcatctgtacaacaaacccccatgaccacatttacctatgtaacaaacctgcacatcctgcacatgtacccctgaacttgttaaaaagaaagagcggaatggatggggcttttctcctgtgatgtggcaatcttcgagatggctttcccagctctcagctgtccagggcaggctgccccctaaccaggtagatgcactttagctgctgattcccggtctttgcaataatgcacaaacacgcagggccccacaacagcctgcctgtcacctgtgatgccccagatgccatctgcagagctcaccagtcctctgtaatgacactatctgcacttgccatttggtcccctgcccacgagcctacgggtttctttagacatgagcttgctataaaatgaaagggcaagcagtgctggtggtctttgtgtgttgagggttgaacccttgtttgttcctcagcagaagaagagagatgctgtccatgctggctccgccaactgtaggcaagtgttgcccagcagaggaggggcgagcctgagatgggcgagtgcctcttttgcagaaatgtcatcagataacctgataaaagcaaaattgaatatgtcagattttgatgccagagcttgaaatattgctaaagctcccttaaaactgtcactgctaataaaattttataataggatacattttgtgtatttgcacacgggtatgtgccttctgatttgctcagtggacttttttccgtgtgttcctgaggagtgaagatcagtggctgattggctgcgcccctcctgtagctccacgtagcatccaagctgcctcctctgaatcccagaaggctttaaattgttcaaattaatttctgaaattagaggacattcctgattcaagaaaaatcaagggacagggatatctagagctttgcagacgagggatctgactctcctggggttccaaggactaaaatagagccccaagcattccagagtcagtgggacccccggctacctcctcgaatgggccagaactttcctgggctgcgaggatgcagtgctgtgctccctgtcaggagcagagagctccagccctcaccctgaacgtcagggtggtttgagaggcctcacttgtgcctacccagagagtaattcccagtgatttgcttattattactagccgtgacccccgacttagtgcagccttatccccacgtgcacattgtatacctggagtgagcccatcccagctccaggcgctccctcagccttcctggtttcttgtctcagtgtccggcttaccttcttccctcaggggcacctttctctccatctcttcccagtacaatctttctcactgtgggaggcatatctccaatgccacctcagttcccctacatcacttcagtagacaagagagctctgtttgtggctctgtcacttaacagcgcttcttctcccctctctgtttctttctgggcctcttttttccccctattttgcttctgaaccaaaggctgctcctccccccacctcgcccagtccctcctcctctagagcaagcactgcggagacacattggctcctgggtggggcttgtgcttgtcaggccccttgcagggtcgaatgggactccctgagctctagttacagatcaaagtgagttgcttctgccacttaccttgacctataactcggtccttgctcttgtcaagatgactggctgccctggcgcagggcgagctcagggtgaaagctgcaagagccgtgtttgtgcagagaccagcgctccccagggccgcatgcttgtgtctcctccctgcagtatgtggcactgggccagccagtgcagtgggacggggacagttcctgcaatggcgctgctagtgtgggaggtgagagagaatattaggaagcattaaggatgaggaagaggaaggtggctggtcttgtatttgcgagacctgggctaacatccaggctgaggcctgaacacttttaatgtgttatctcatttaagccccatgacaatcctgccagatgggaatgatgctaacccattttacagacttggaacctgaggctcggaaggctgaagtgacctgcccaaaggcatgcagcctgcagtgatggaggggggacttgcagctaagtctggcttgacttcaaagctgattttaaggcacactgcctcctgataaggagagtgccccgctgttttatttatgggtaacactgagttttcacaattgccctggtcttagaagaatctaaaataaggtttaaaaatttgggtcatgagtttctacaagttatttaattttctagtaaatattgtaataatacttaaaccatagcatggttttaaggagcagatgagtcaatgtatgtaaaatggtgcccagtacacaatacagacacgtcagctcttttagcagtcatgtaacaaaagcagcaccattgctgaagggaatgattaagaaacacttgaggcagagccctccttcagccgctttctgtcctaggcaagggggttaaggctaaggagacacatgcagaccttttcttctcatgacttgaggtagagtttcctgtccttcctatgattcagcagctcagaaatgacagaaagacctattatgcttgcttcttaaataagattatctgtactcctacctctggaaacattaaaaaagctctcaaaactattattttctagtgctttcatacaatgcaaattacagatgttaattggaatgcagttctccttcttcagacttatttcccaagtggacagattgaagctcacctgggcttttccaagcattttgttaagtctaccctcaccctcagtcccttattattcattatctattaccctggaacatataaacattcgctgctggctactatttccttgtagtttattcaacagtttggatttgatgtatgggttgttttttttttttttaaaggaaaaaaaacccagacacccaggaaattaagaagtttatcaattggagtcctagagcagcccaatgctaaggctgtgaatgaggttcacaggactaaagacttaattaaatgagtcaaagtttgatttaaattgtaaattctctgttgatacctaatctcagtctcactgtaagtgaactgaattttaaaaaacaaacacactctgcttgcggacagtagccccatctaggggtagagcgtttctcttctctctttcatttttctaaattttcctcttcaatgtttattcaacccaggccattagcaggaggaagggaaaaattcccagattttcagacaacaccattttccaccagtttctcgggaaagctgaaggatgcttaaagagaggtgtgactgagcattgatgaggggggaggaggctacaggacattttcttccatctggtgtcacaggcagagcgtcccctatgctgaaaaattaacagcaccatgctgcctcttttatttagtgcccattccttaagacagagcgcaggggatgctctttatagtgtgagctgctgggtgacaggagtgtgggagcggagcgaaaacgagaggcataaaaccccctcttgcaaggtgagccaaatgcaaactgatgttttatcagcttcacaggtgctgctgcccgcattcatttgagaccttggcacctcacacagctcccgtcattttacggcttgtgctcgggagcagtgaaggcccaagaactgggaagtggagtccctctccccggttcaggggatgctttagtagaggaagggagggagctcatggccagggtggacgaggggcttctagtttgcacctggatatgacattttagcttcttcctgttttctaccttccattttgatgaacttactcttaggtttttctccgtggagaaatcctggagaggcatatgataattatgatcgtctctggtttacacgtagaaaatcacagtgtagaataatgagcaggtttaacaagcatctgtgtattaaagaggaccctgctttatctctatccaagttccctgaactctcattcacgctttgcttcgtatgaggtgataaaattgaaaattgattgcatgtaggaggctggatttaatcgaggccactcaggctggaattttaactgaatcatgtacggcaatttccccctcatccagagccagggatcttggatggaaggatgaccagatgaggggactccctgtgaccactggcatcgcagaacctctgcatgctgctgggatgagtagcccacatatggcagggctctcaggaccctgtgtggaaattttaaaagagaaaagaaagcaagcgaatactactgcattgagaccagaactactgaggcttgaaaaatgcacagatttagcacccccaaagctggctgtaaaaaggccgcactccgagttagctgctacaaaccagagggccaccaagagctcttcagaaaggaagctatttaggggccaccccctttttaaagaaaaaagcctgtcatctttctggcaaaaagccattgaatatactgagagtcatttgctggcaagcaaccaaatatgtaccaaaaaataaattgggtatttaatttaagacaactgaaaatgcgtctgtgtgggcagcttcaaatcgatatgtgctggagccacacaccctttatgtgaactgcaatgaacacttccaccaccagttagcgtgtttgcaaaccctccaggcttagagagacaggggtcacccatgcccgggaaaataaaattaaaaaggcttttaaaagtccaccttaagagcacgtgctgccggctgatagaagaaacaggataactcagttgcctacaagcaaagtttgcacttgtgcctgagcccctccccaaccctccccatgcgtggataagccggtgccgcctatccccggcgtggaaacgcatggggcccagctgcagcatgcggtgtgggaaaagcattttgccgctgccagtgtctcgggccttacatcactgtcgtattagtctaagcagaatagagcagattgtttattttggtttagctccgctgcaggctgtaacatcagatgtaactcccagagtgacaaatttcaatcacaatgtcacagattaaacaagggtacggaagagtggggtaagcacgtttcccagggggtgtggagtgggggttctgcgtgaatctgttttccaattttccctgccccaggaagccccccttccttctcaccatacgctcaagtcagttcccttttgccccatggattggtgacagtcacagcatcccatcctgtgggttaaataagccaggtctttaatttatttgaaaatactaaataaaaatgattcccccttttccttagagcatatttaactcctgtcgtatttcagattttaaagaatttgctgagtagttttcagtatcctgaaactccagaggggagaaagaattagtgaaatcagtaagagacggacttaccctggagagcgacttggccacagcgggcagaaatgatgcctagtgagtataggccaagctctgcctgctgacgggggtgctccggggtggggtggggtggaggtgctcacaggcttatttgctacatgttcagtcatcacgtagctaggtggggtggctcatcccacagaccttctttaaatcccaggcaggcaatggtacaacaaggcaaacttgctgtctcccagaatggttgccctggcctgggagggacccctcccatcgcagccaccctgagagccagggcgtgtgtagcatcagcttttcttgcattctctgaaaccctcaaactgttctgcctgtggatatcatcatcctcatttttcacacatgaacctccctctacccagtgcttccagcaatttgcagaatgcagtgtctacaatgtaacaatctgaagcttccagccggcttgttcctaatgagcgtgttccccaggtagaagaataattataaagtatcttacctcattgatggtgttattcaaacggagcatcagtttattaccatttcccaaacaagttatggataagaactggtaaataataacaatgcctagttaccgcaggctattttgaaactgtggagaccagggctgtgtactctagtctttttcctgtaaattagatatggtccatgggaagccttagaagcctgacccgtttaagagtgagaatgtgtgaggccttctacctgcaaaggaagaaggagcttttccccactgcctttctggagggggattatttggctgtgtagaccgactaagggagaagtgtttggattactactttgcatttatacagcaaacctctcggctcctagatcagtgcataaaactggtcagttttatgatctgactgagtggatggagaagctgagacatggcctctcctcactgtgtgctggagaccctgaatcccagcggctgctcttacacgatgtctgtgccgctgtcttaggttgggacttttgctcactgtcttttagtgtttgatcaattaaaaagtccagagttccatgttttctaagtaattggtttcccatagattctgagacatagcttccaaaataaaaaacgaatcatgagttcctttaagttgctaggtttactgcaaaactacatgtataatctaaatagttctaggtaagatctagtaggaaaccgaaaggctccttcaggacccatgggataggaacagagctggagtgctgcttcccacataccctttctccacctctgtgtccactgtcgtgggtgctagcctcggacacaacaacttacttatccatacagtgaggcagaagctgcagactcatctcacttctcaatggttgcataaccaaactccaaccccgatctgctcactccatccccacctgcccacccggacatccgaggggagtctgtgggagacggctgctgtgagggagagctcaggtattgttcgcaccaatgaagagagataaggaagtgtcaagactgaggcagcccagggaaaaaaaaatgctaatggtcctagaacagcatcaggttatagctagagacatttagtcaaaaccttttcttttgcgtttttctaggctagggattagcacttcatattataagctacctaacttatcttaaaacagcttcattcccttattaaaatgagcctttcagaagacattaagcaagaggattaggaaatcgctcaggcctccgggcaagcacttcagtgacgagaagtcatttggccacccggagactgtatctggcggtgccccattccagggatcacggcttcttaggctgccctggctttataagacattttctgtgctaccagctcaatcagaaaagggggctcttagagtgggcaccatctcttagagcgggctccgtctccttcctcccggttgttccatagcacacagtagacgttgcattgtctacagtgaactaattgtatgtgaccttgggcaagtatgtgtgtctcatgaggcttcctattgactgcagcctggggatcatagtaatacctctaggactgctcctcaatcggccggggatggggggacactcactatcacctcccaccctcagccagacattcggcaatggttggagtcatagttggtcgtcccaagtaggagaaggctgctggcatctagtgggcaggagcggggatgctgctggagaccctgcagggcacaggcgccgccacaaagctttctccagacagaccgtagagaatggggagggtgagatgccctgctccaggatggcgcatgtcattgtgtcacactgtgtggctgtaagacaccatggaggccttagggatcggcctgtattacagttccgcgggtatacactgatattgatctttttttttttttttttttttgagatggaatctcactctgttgcccaggctggagtgcagcggcatgatctcacctcactgcaaccaccgcctcctgggttcaagcgattctcctgcctcagcctcccgagtagctgagactataggcacatgccaccacacccagctattttttgtatttttactagagacgaggtttcaccatgttggccaggatggtctcgatctcctgacctcagaatctgcccacctcggactcccaaagtgctgagattacaggcgtgagagccaccccacccggccgatattgatgtttaccatctgaaaaacaacgctattattctcatgaccatacttctattcaagaaagtactaagatattttcaaaatacgtggttctatgggtccccataaagctatgcttattttgagttttaaaacatcaggcatccctaatatacatttgcatttctcttgaagttgctcttttgcagaaatggttgctaattgaaaagtgtcaagagtaaataatggggcactaatgacttgaaaaggaagaacatgtgaatctagtaatgtgtccagttggtaaatgtatccaatcctacatgggagaaacttccacatggggacagaaacaagacagccagacagttgctggatcctggagcgtgggggccttcctgagggagtcccaagaggcccttgtggctccccagtcatttggcatggcccaaagtggctgctgctattggaagccttctctgcagggacttggaccaggaacagacttgtgttgtagtaggaaagggctgtggcagaccctcttccttctgcctcctctccctgtttccctccctgaacctcttattttttctggattctgaatagggtaccaagccagctgacatttacctgcacaatatgattaaaggaatccacccagattacatttcattcccacttaaattcccactcatgagactggacagtaagagtccacaaaatgttaagagaggcaaagaacatttctgctgcttctgcacagaaccagtgctccctcgccaagttcactgttgatcatcttgaaatgcatttccttgaaatgcatggctaatgttatgaaaatcgggaacctccacggagcctgggatttttctgctgtcagttgacttgtcaaggtggttttggaagcagaacacaagacaatgctgtttcttccctctgtcacttcgtgttgattttgtgctggatatgtgaggaggaagccgatgatctgtaagcagctgacatgtcacatgtacttagaaatacatctggacaaattacagcttcacatccaatcaacatcattcttgggatagaggtcagttcttaatacagggcttttatttttatttcattgtgttttgttttgctaatgctgtaagtggaaactgcagaccacctgtatgtttctccagttgtttgcatctcttggttagaaagtagttcctaatgaggctgagtatgtgagttcaatcccctttatgggccagttagctgctctttcttggttcttacaggaccatataaccgttactgcagagctgatgtttcctgttgataaaaagggatctggataacagtgagatgaaccagaatgtggagcttggccagcctgtgtttttgatgacctggtcccttgctgtggttggggagcagggtcataggaaagggagacttttggccatcttcctctccaggctgcacctctttcttctccttggtatgctggatgccattagaaggaggttgcggacaaagcaaacagaatcccatgctaaggagtttgtatttattcttcagttaaaaaatcatacaaaatcataagtaaaaaatcataagtatgtgaggtaatgcatttgttagctaaattagcttgatgtagccgtttcacaatgggtatatatatcaaagcaccatgttgtataccatgaatatatacaatttttatgtttcaatttaaaaaggaaaatctaataaatgtaaaaaatgccttgcgccaagtagcagtgacccagtgacaccttgttattagtaaaacaaaggcgggccgggtgcgggggctcacgcctgttatcccagcactttgggaggccgaggcgggcagatcacgaggtcaggagatcgagaccatcctggctaacacggtgaaacactgtctctactaaaaacagaaaaaaattagctcggcatggtggcgggcacctgtagtcccagctcctcgggaggctgaggcaggagaatggcgtgaacccaggaggcggagcttgcagtgagccaagatcgcgccaccgcactccagcctgggcaacagagcgagactccatctcaaaaaaaaaaaacaaaaaacaaaaaaaacaaaggtaaccccgacacactaggagacaggaacacgcagcagagactctggttccagggccagaggggcaaccccagtccttaactgtggggcatggttttgggcaaattgatttttaccttgctgagccttactgacctcgccctacaagtgggacagtaaggtgtaacctgtacaaattgctgtgggaggtgaataagagagatggtagtagggacaaaggggccagtgtagccgaagcagggcaccaacatgaatatgacccagctcccggccaagctacggacttggcgagaggcagatccctagctctgcaaacttgttcacttgctacatatgttatattcccatccttggttcttgtattggcattttttttttttttttttttggcatttagtgctaagtggcatgaaggttaaagacttggggtcctcatacacaggttcccgaagctctggtgccttcagagcacatgttcaccaggctctgggagtggaggagctgggctgcagcttccctttgctttctttgctctccggggcatcctgcaggggcgtctgtccacaaagctttctgcggaggcctttgcggggcctacccagaggctgcatcctgagagtggcttcctgagcgttagtatccacctggcagggggcaagaccaccagcagggctctctaggccaaagagacctcaggaaacctgtttcaattcatgtcagtctgacataacccgcttgtctgatcctcagaccgcagggagcacagagagcctaaagatcagtgaaaaccgccaaaagcctagattcatcaaaatgtctccaagggaaaaaacaaaacaaaactgtcacgaaacacaatgccaccagtgcagtctacttggaagaaagccctgcagaccagactgtggttggcaaaggagctcatgggtgcaaaagcacttgcactttccagggcttcttactatgctgctgttattgttttttttgtttttgttttcgtttttgtttttgttgttttgagtctggctctgtcacccagactggagtgcaatcgtgtgatcttggctgactgcaacctccgcctctcaggttcaagtgattttcctgcctcagcctcccaagtagctgggattacaggcacatgccactatgcctggctaatttttgtatttttactagagacaggtttcaccatgttggccaggctggtcttgaactcctgacctcaagggatccacccaccttggcctcccaaagtgctgggattacaggtgtgagccgtcgcaaccggctcttttttttttttttgagatggagtctcactttgttttccagactagagtgcaatggcgtgatctcagctcactgcaacctccatctcccaggtttaagcaattctcccgcctcagcgtcccaagtagctgggactacaggcagctgccaccagacccaactaatgtttttgttattgttgtatttttagtagagatggggttttgtcattttggacaggctggattcgaactcctgacctcaggtgatccgcccacctcagcctcccagagtgctgagagacagagtgcctggcctgttctgcatattctttagtgccctctctcaacacagcacagtgagaggcagccagtgagaaacagaggggcgggaagcagagctgacgcctgtgggaggggcaggaaaagcaaaccagcagcccctttgggcagaagcacagtggcgtgaggtcggggggcccacaggaagcagccagcactagattgctcccaagggtctgccgtgctgttgtgcatcactgtttgccgtgaagaccctgaaccacagagtcgtatttgtaatactcttgggaacaggatgtcacatcaaagattcactcaaataagattaaaaatattttggtgctttatgtagggttcattttctgaaagtgccagaaaaacaagaaattattaagctaaatagttactggtaaggctttatttggcttaattgactaaattttgaattctttgaggaaaggagcagggtctgttacttctgttattgcctacagtattttgcaggttactcacaagttgtgtggtaaataagatttgattgaaagggaatctttctatttattcagattcttattttcaaaacacagaggtcttttattcctttattcctaaggtcttgagctgttcatcacacagaataattatgtatgtaataagtgcatgaaaaccagtataatttcaaattcatgagcagaacggtggcactctagaaaaggcaaagtcagttagtaaacttggttgtgatcagtaaagctggtaactaaatagtcaataaaacttggtagaaatagaattctgttgtcttttagtttccaaatttgagcaagtggactacaatttaaaaagtaaaatcaagggccgggtgtgctggctcacgcttgtaatcccagaactttgggaggccaaggtgggtggatcacctaaggtcaggagttcaagagcagactggccaacatagtgaaacctcatctctattaaaaatacaaaaattagcccggtgtggtggcacacacctgtagtcccagctactcaggaggctgaggcacaagaattgcttgaaccagaggcagaggtttcagggagccgagatcacgccactgcactccagcctgggtgacagattgagactctgtctcaaaaaaaaaaaaaaaaaagtaaaatcaattgaggtgaatacaaggtagagccctaatttctagtctaaaatgattatattttttaaaaattcaatgccacagttatatagatacatgtatcctctgaatacctacctgcagtgataatttgctcagattctaaaaacccatctttcaatagccttctggtaattgcagtaaaactcaaacccattgggaaatctcagttccctagactacctctgatctgagaggaaaacaacatgtgaaaaagacagcatcttcagggtcttcagatgaacagagccccttccatagctcgtgctcactgtgattaagtgtgagtgggaagaaatgtggtgttgtaaggacccccttatctgagatgtggaaagatgtgttaattaaaggagaacagtttggccatgaatccatgtaagttaggcagacagaattttcctggctcattttatatatgtcatagtcctccaagctcattccctacctacaattaagcctccccattgtgaagagcaggtatgaggtgtacacttggacgtggtgctgtgtcatcttattgagctatattcttgtcctgccaatgcaaatcaaaattacacactatgggatttagatttccagaagagagaagaacataagtcttcctgtttgggaggctatttcgatcatgcatatttgcctgactttctcccctaaaactcactcagcgtgtccgttcctacatgcctctctgttgaattggtgctgtcagaaaggataccaagcaaatgtatttaatgtctttgggaaaagaagttatgggttaaagcctctgccagattcaatctttgttttggcatgattcaaaaatgtgtattgtggccatctgtctagaactgactgggtggaacaaggaagcttgtcctgcgtctgagatgggttggtcacctccttccataggagaaaaatggcaatggataaaacacgggtgcagacgtccacaaatagaacttttagaaaccttcacttttgcatttgtacattaatgggttttctgcaaggatgagcagaaatatactatttttgctatagtcatcatatgcctatgtgtgtataaatagatgcatgtattgtattttgtatttatcaagcttaacccaaaatggagcttatcaaaataaagctcatttttatgctatcattttccaagctaataatttatttttaattttcttttgttttaaaatttgtcttaaatatgatttttctactttttacatgaatttcattcatttctctaattccttgtattgaatttcagagcagtgacccaaggtcatccgtactgacatgttttggtatgaatcttcgtggtaatgataatagctacagtaatgagggctcctacctgctagattgccaggctttttaatttctgttagatggtttgcattttagccagggtcctctagagagcagagcttggggcaagagtgagagctgacactttctttggaaggtggaagcccgggatggctagggtgaaaaatagaggggaataaaggcaaggaaacatgagaagcaactcgaagcattcttgccggccgcagcttcaggggccctaaagagccacagttggtccttagcaggtgtgtttgtatgacacagaggactcttagtgaaaatttgcaaggaagaaaccacaacttggaccagccctctgaaggcaaggagaagggaaggaggcctttgtttacccagaatcctcctgtctcccattactatggatgaaggtgtgtcccggggggagcagacaccctcgcatttccagttcacatcacatttccttgcacttgcccaggaagcaaaaccccatgcccagaagatcaagagatttcattcaagcttgggagtagagcggaagctccatgctgaaaagtcccttgagtggggatgagggccgggtaaacccaggactaacttggttaaagttaaatctcttgagagtttgacaaggacacttcctggaaagggacatggccatgagcagcccagaccagaaggattttggaaatattgacgaggccaaggggtcctgaggaggtgcttaactaagcagagacaagttcagattttgtggggatcttaaattacaccatttgggagaccttctttaagaaacagaatgcaaaagtattactataattgataataagaaaattacaacagattataaattttaaaaattcagtagataccaggaaaatcatacttttagaaaaataacatatttcaattttcttgctgtgtgatattccctttaatactctttttcctatgatttttggtcatatgcctcttggcatatgacttttattgtattgctttgtataaaaagaatagaaaataatttagtcttccaagcatagtcgattacaatttatttttattattgatggttttgaaaagtaccttttagttttacaaattattggaaatatgacaactttgaggcttgttttcaaatttgaggtaacttctaataattttccattatttctggtgtgtaagattgcagagcatttcaagtcttattgcatagtgactgcttacatatttgatcaattgacaaaactcatcaatgaatatgtcttcaatatgtccttttgtgttggcatattatgaaatgaatgttatcttagtcaatgttagtatatcatgtcaaatcaggaaaacatttaaatctttttttcaatgtggccctatgattatttctcttagttaattagcaaatacttgaatggcctgttcattgctacacgcagttcattattagtagataaatgtagcaatttagtcactggaatatagcacttgcttctgcaggcattttgttaggatgtggcaatttgtgtactattttcatctggagcccagatttctttggtttgagatgtttccgatacagtaagacatgatctagtacattagggtgtataaatcacgcaacttcataactgccatattcactgtagtatttatttctacaggtttctgcacttcaagtgtggaaataccggtaaattctctctcaagtggtttccattaaaataaacaaaaagcgtacatgattcatttgtgtttatgcacaaggccttatcaagtatattcttggccaaaatgaacttctgtttgacaaggtgttgatgagaatcgcaccttgcacttatgacttggcacatctaatgattgaaagaattatccacagacaggcttctggctccctaaacttcaaacctgcttcctttttctccatccacacgtttcaggtgctgggtgccatatcagaactctgatcttccctacttcgtggcgttgggtgggtgtgtggacacagtctgtgcgaggaggatccttggaagccatgcttacactgaaacacctgggagtatgttacttcagtgaaggaataactgtaaactccataccacatctcactaaatggcagacaaactgcacatatatagctcagcttcccaaatacccattaccactccaaggccgcctgacacagggggatttctaccagaggcagtgctggagtggaaaggggcacctgtcctaagcaacagctgtgaaaatatcttcttaaattttggggaatacatagccatgtgatcaccttgctcagtcctcactagacctcctgacaggcccaagcaagtgaacagccctgaagcttcagcttcagcagttcgcagaaaaaccttcctcagtgcacggggtttgcacaccaagggagtgtgcacctaaatatttgcatctgcagtcatgaaacctgacttgccaaatgtggctttaatgggttaccctaacattttaaaagatgagattttgagattattttctcttaaagcaaatctgtaataccatcctttcggccaatgaaagaagcaagaagttaggtttctgtttttctttactgaaaatgagaaaaatatcttcttctcctagggtaacttgaatgccaaatatttcatacacttatggacaggattttaaagattcgtttgtttggattcctcctagtgtctgcagtgtacccagcccatcacacccatagccacacccacgcattgcctttgggtgaaagttgcatatgataatgaattattaagctaatttatgaatagatgaatgaatggaatttatttcatgatttgctgccgacagaagaaattctatttatttcataaagaagtacatgccaacaggaaaaaaagaaaaaccaggatgggcacagtggctcacacctgcaatcccaatactttgggggaacaaggcagagggatcacttgagcccaggggtttgagattagcctgggcaacatagaaagaccccatctctaaaaaaaaaaaaaaaaaattagcctggcatagtagcatgtgcttctcgtcccagctacttgggaagctgaggtgggagcatcacttgagcccaagcggtcaaggctgcagagccacattcatgtcactggactccagcctgagtgacagagaaaaccctatctcaaaaaataaataattaataagtaaaccagttaaaaaaattggcaaggatataagtaaacaagccaattaaaaaattggcaaaggatacaattaggtcaaattgaagatgatagaaaatttatgataaaagggtttttaacaagacaaacatttaattctcacataaacaatgtccagaggtaaatggtcaatgactggtaaggtggcttctcaaacattatcatgatctgagacccctctggtttgttactgtaacatccaaaacatttgtcttttttttttgacagcgtttcactctgttgcccagactagaatgtagtggtgcaacctcggctcactgcaacctctgcctccaaggttcaagcaattctcctgcctcagcctcccgcgtagctgggatttcaggcacacaccaccatgcctggctgatttttgtatttttagttgagacggggtttcgccatgttggccaggctggtgttgaactcctaacatcaggtgatccgcctgccttggcttcctaaagtgctgggattacaggcgtgagccaccgtgcccagccatatgtgtcttttattcatcgtccaagatgcatgcctcagcttctgctgttgcgtctacattccaacaactaggaaagatgtgcacttttcctttaaaatcactttctggaagtcttataacaaacccttttcttcatgtccccttgcccagtgtttagtcacatgagtatccctaactttaaaagagacttggcaatgtagtcttcatcctgtatgaccgcatgtcccattaaatattggggtgttattgctaagaaagactgagtgagtgaatattagagaacagcaaatggtctgagctccagatataaataaaccattatcaatagaaatgtcaatagccaagcaacttaaaaagtgaactcactagtaattttaaagatgccaggggccaggcaggtggatcatctgaggtcaggagttcaagaccagcctggtccacatggtgaaaccccgtctctactaaaaatacaaaaatcagctgagcatggtgatgcacatctgtagtcccagctactggggaggctgaggcaggagaatcacttcaacccagggcgcagaagttgcagtgagccgagattgcaccactgcactccagcctgggtgacagaatgagactgcatctcaaaaaaaaaaaaaaaaaaaaaaaaaaaaaaaaaaaaaaaaaaaaaaagaacaccagtggaaatattttccaaaagtgaagcagaaagaaaatactcagtcaaggctgtagggatgtaagttctctcctgtactattttggggatataaagtggtagggataattaggaggaaaatttgccattgtctgtgaaaatgaatgtgtgatcactttttcctgaaagttaacacttctggatatgtttcttaaagaggatagaaagaagtgtactaagctgtttcatacaacattatttgtaatagtgaaagtctggattaaaaaaaaaatcccttttattgggatgggttaaacacatttttatatagccatagaattataaccagacattaataagaatgatgattatgtacgggctaggaaagatctccaagatggatcgatatgcacaggataattctgcctatattttaaaaagatttaattctgcctatatttttaaaagatttatgtttaaatacatcctatgcttcagactgatatcagtgggtatgttggtggaggacaaagagtgagtatgtttgggggtttttggtaattgggggattttactttttgctttatataattagtatttttacaaaaattattttctctgaaaatatttttaatgaaaacatataatacacatagtcattcactgctatgaaccatatggtgggctttttgtccattttttagatgcataaatgtgtatgtatatctgtgtctgtgaattattatattcataagatagtatagatagaatcacgctgtacagagagtttttgtattgattttattacatagtgtcatattgggggtattttccaaaggcgtttatacttcaaaggtttattttaatgattttcttcatacgcatactatgttacacataaccacttccaattcttgaaaatttaagttgtttgcaatttaaaaatatatttataaacaattgtttatatatttatgcttataaatatatacacctataaatgaatatataattatataattttatttatgcataaaattttatacttataaaaattgccatttataaaataaaaattttattcatatatttttataaatatttgcatattgtatactgtatattatgtaattatatttgtaatatttgtttatatattttatatttatttgtaattttttataaagtaaatgaataaaatttttattttttaaattatgaaaaattacatagtatatattatataaatatttataaacatataaactttaacattataaatgaaaatataaatatttaaaaaattatttgtaataaacatcttcatacaccatctttgcccatatattttattgtcacaggagagattattactaggagttgctgtgttgaaagttataaactttttaaaactcttgatatgaattatattaccagtttgtttttcagagaggttttgctaatttatattcccactagcaatgtatgagtgaacccattttgccagagctaactaccattgaatttttattcaatggtggttattgaatttttagaaagattgtaaatttgatgagcaaaatgctctctttctggtaaaaaagtttaaattactattaataatgaggttaaacagtttcaagcatttactgggataggtacgtttatgtcactggcctattttctgtggcttgataatagcatgtttttactaaattgtaagagctctttatatactgaggataataattttttcagtgttacttattactaatatttttaggcttaatttggccagttaattttatgctgttttggatattatgctttgaagtatctcttacgagttttgataaatcattttttatttgaaaaatattttctaagcacatgttaaatatctgctgctatgcttagtgattggacttcagtggtggataaaataaatttatctactttttctttgagattcgctttaaaatgtgatgtgccttaatctctgaaaggtagcctttgaatgtaaaccaaatgtgtttttaatagcactattgtactgacatccttagagtagagtggaatttctgttattagaagctctgcatgtatttttataaaatttatttaatttgggaatttgattgggggtaatacctatagagatacaagaaacatttaggagtttaacataaatctttgttacttttatgctcattatttgctattatttttatttttatttttttgagacagagtctcactcttgtcacccaggctggagtgcagtgcgtgacctcagctcactgcaacctccgcctcccaggttcaagcgattctcctgccttagcctccctagtagctgggattacaggcacatgccaccatgcttggctaatgtttgtatttttagtagagatagggtttcaccatgttgtccaggctggcttgaactcctgacttctagcgatctgcccaccttagcctcccaaagtattacaggcatgagcccacatgcctggcctgctattatttttaaagggtatcacatctgtattcatctacctatgtatcccctttattttttatgatatgagaggacagtcaaggactctatgagaaatgaaatttccatttatcaatactgttcatttgggcacctaagttcggagtataatgtttgaatgcaatgtacattttcaagaacataaccgcagtgcgttgagggtattgaaacattcatgcactcagatgccacttattgaatgtctccaggcctaaccacagtacatgttagatggataaggccctcttcacctgtccactgactccgtctggctcccatgcccacctgtatacctacagggcttgaccttccctatcttaccccacattcaaagacttctccagttcgtagctctatgaagtgtgtggaaacaagtgtgtcaaattcccaggcccttgttgttggagatctcttgccttctagtttttttgagggaaaaattacatcattgctactgtcttactgccttctgtgaaaatggttttccttgctatctagtaacctttccaaacttgctaaattctgtttgaaagtgactaggggctgggcacggtggctcacacccagaatcccagcactagggagtccaacgcaggaggatcgctttagtccaggtgttggtgatcagcctgggcaacatagcaagatcctatctctgcagaaaaattcaaaacttagccaggcatggtggcataggcctgtagtcccagctaattaggaggctgaggcaggagatacttgggcatgggaggttgaggcagcagtgagctgtgatcgcaccactgcactccagcctgggtgacagagtgagaccccatctctaaaaattaaaaaaaaaaaaaattaaaacaagtgaatcagatgtccagtctttccactttgttttgaacttcttgacctcaggatagtaggactgagtctcacaaggacctgcccctctaccaaaaactggtctttgagtttccacctatgtgtctttggtaaatctgaccttatctttcaggagagctcaaagcagtcacctcacagctgtccatttccccctacccaatctaattaggttcatctgcacctgataactctgtgttgctgtgtgccgtcagagtaataaaatgcatgtctgtgttatgatttgattaaccttcattggtgccaatgctgtttctctgtttccatggctcctacgccagtagactatccaaggaattattagttaccttatcagagcttcacatcttcaggctcttcgggggtctccttggagcaacggtgggaagtgattattctgcctccttatttgtgttttctggaagcttggcaggtcaagttctttttgaaaatattgggttgaggaaatttaagatgagatttcttacgctgtaggagtagcgttgtcattcgtgatcatgtgtgattgtgttcacagttctttgtttttattgtaacttagtctatataaaccaaaaccaaaatgtcgataaaattttccacatgcaatgacaagtattgatacatttaagacttttcagttttattaacaagttaacttttcttaaaaataaagtggaggactgagcaatataggtttacaatatttcattttaccatgtaaggatgtttaaaaacacagtaacaaaagtatctagtctcaacatcacttaataaaagggaatcattttaacaggaaatctgggaaatatatagtttcaaataaaggactttcttctaattggaaaatttgtccttgtcactagttggtggtgacaaacatacactaggtctaaatccctggggactgggcatgggaaacccacgtggccctgtttactctccagttctgagggggctacttcttagctctgcagtgaggctcacaattcactaccatttagagcctcttaaaatcgagacaggattcatgcccagagtttatcagaagtctgtgaatacacaaagcacattgatttttcttcctattcttttccttcagaagctatagtgatgggggctccaggagtttttaatgtgattccagattaattctctagcagtggaccgggaaggtagaattgatcaaattctaggacccagtctcctgggcaaatcgaagcacaaattagaataacaaaacaaaaactttatgtgtgtgtgagtacgtgtgcatgtgcgtgtgtgtgtatgaaagtaatgaaagcccaaagccaggacctcattttttcagttcccttttgcagggagaacttacctatgggtaccgttttggaggacaggaatcaaggcatatactgaaccctgttctctttgtgagtgaccctgttgccatttgggacatctgaaacagggcatgctttcaaatgcagcatagtgacaatccttttacacgttgctcaatagcaaaattggggttaagaaagtgactgcgcatgaacaatttttttttttttttgagatggagtctcactctgtcacccaagctggagtgcagtggcgtgatctcggctcactgcaacctccaactcctggggtgtgaacacattcttcttgtggcctccctccagctgcattgtgagaagacagccacatatgaaaatctttggttaaacaagccactgtattcttaaaccttttttctgtgcatgaaatttttcactgaggtataagtggtgtgtgataaaacacacatattgaaagtgtgcaattcaattagtcatgatacatgtatacaccggtaagaccactatcacagtcagtgaacccatcacccccacaattgcctcaggtttctttggattctctccctcccaccccactctgcctccccttctcatctcctggagaccactgatctgttctctgtccccatagattagttaccattttttagaggttttggaagtggagttacccagtgtgtgtttctttctgcttgtcttctttcacacagcatcattattttaagactcacgcatgctgctgcatatgtcccagctccctcctcgttggtactgagcagcctgccgccacatggactgcagggatccaccagtttattcactcatcagttgaggaacatttgggtggcttcctgtttggggctatttcaaacagagctgccaggagcatttgtgtacaagtttttgcatgcacacgggttttctctgcattggttagaaattctggagaagaatggctggatctcctgttagatacatgttcacctttttaagaaattgccaaactatttttccatagtgagtgtacgtgtgcataccattttccaaagcgcaggtttacaccagcagccagacgcttcaggtgaacccgtcgtacagttttctagtcttctctgtgcagctctctctgctcagttctgttaactccagctgccccgtcttccccctacacacagacctgtgggttcaattccgcaagtctgctgagctcccgctggggtctccctccctgaaccagggcctggccactctctgaaggcaggaggctggagtgattgcaggactcagcacgcttgcttcctgtctctcacggacctttgtcccacattgtctcatgtcactgtcttgaaaaccattgtttcatatattttgtggaattattaggttgcttcagggagggagataaattcagtgcttgttattccattgtagccagaagtgaaagtctgataaggcacttttgaaagttgaccaagttggatattaggatctgcgttaaccaccaggaacaaaaagtcccctgctaagtaacctataatcagcccacaaaagaatggtaacttttctttgtataggtgaacactttggatggttgaactttgtatacctgaatgtttttagataagttatagttctttgaattcaaagtacaatacctctagttgtataaagctaggtgaaaagtgtatagcattattcattttatacatatgaaaattgagtccaagaagtaagtgcgagtgtcctagaatcatatgaagtaacggctgccacttgcagttgtgtaggttgtatactgcacaggcatacctggctgcagcaatgaattggggatgaaatgcggcttatggtctgttccctagacttagttccctggtatgtggttgcacacacctagagagagtttttctcattgtcataaaagtacctcaaagacccataaattcagagaagaaactgtgtgatatgatttggttgtgtctccacccaatctcatcttgagctcccataattcccatgtgtcatgggagggaccctgtgggaggtaattgaatcatgggggcgggtctttcccatgctgctctcctgataatgaataagtttcatgagacctgatagttctatgaaaggcagttcccggctgggcgcggttactcatgcctgtaatcctagcactttgggaggctgaggtgggcagatcacctgaggtcgggagttcgagaccagcctgaccaacatggagaaaccctgtctctactaaaaatacaaaattagctgggcgtggtggcacatgcctgtaatctcagctacttgggaggctgaggcaggagaattgcttgaacccgggaggcggaggttgcggtgagccaagattgggccattgcactccagcctgggcaacaagagtgaaactccatctcaaaaaaaagaaaaaaaggcagttcccctgcacacactctcttacctgccaccatgtaagacatgcttttgctcctctttcgccttctgctataattgtgaggcctccttagccatgtgaaactgtgagtctttattagcaacatgagaatggacgaatacactgtgtctctttagaaacctctttggtcacagcacatttgacttccaagagttatgcttcaggtggcaccgttatgtcagtctggacatttttgtgtattctttgtcactatgaagaatattttaacaggaatggaaacagcacaatattaattcactcacagcacaatgcttgaataagagtagaaagcagtgtagccagtgttgctcactacaactagagactggcagtttgtgctccttggatgtttgctcctggagaggaaaaaacgtcgcatcaccaaagatgctaccttctgtcagcaaggccctgagcataagataaaaggatcctcttttatttggatatatttgccccacctctgtccattttacctgttttagaccctttgaattggggtctgagtatgaaacagaatcaatccaaataattctagatgctttaatgacaaagatgaatttgcagagatgtgggcagtggtagtgaggaacccagaaactgccagctccatcagcaccccagtctttcagaagtaagtggcctgcttagtgctgccgcagctccaggaggcatggaggagaggaagaggatggccaagaggatctgtagcagggaaggatgaagccactgtcagaaaatgtgacccagagctgggtggcagctggcagccagagatcaggggagccttgtgggtacagccccaagggcccaactttctgggatgcagagcaagcctggcagggcagagagtcgtcatggtgatgcggcatgggcatagggggtgggggcagagagaaaatgtgcactgtaggcttcccggttattttctctgtggatggatgaatttaccttactgattatggaaggccagacaggtcttttccttttccttggataagaagttagaagagaaggagaaggaaactcagctaccccgagtcccacccatgtggcaggcatcagccagaagctgtccacagatactgcaccgcctcgccgcagcccggtgaggctggggacatcccctcctgtggtgggtgaggcgcctgagactggaggttgggcaaagggggactcacatgctcaggtgcgcacctgggatgctgaaccaggatgatgagaagttcatatcctttccactgcacttcctcccacaagctaagcctctcctttaggaaatccaactgtcttcctgtcagttaaaacagaatccatccaaggaggttaagcatctggtcttcctgctacgagtctctcacctgcttcagtccaacttccatgtctgatttatcttttgaataaacaagcctcactttgttacttcctgcctgaaaacttctggttccatgtcctattcaggttttattctaattctttcatcacttttgactatcataaataatgctgctgtgaccatttgtgtaaacgcctttgtgtatacatgttttcactcctcttgggagcagactttgtggaattgccaaactctgtggtagcatatattcaatttttaaagaaactttacagttttaaagaaactgccaaactatttttaaaacattttaaagtatctccacaataatatttaagggctttagtttctctatatccttgccaacacttggtattgtcagtctttttaattttggatattttagtaggtgcatgataatatcttacattgttttaatttgcatttccctgttgtgtaatgatctgcaccatcttttcatgtgcacatttgacattctgctatcttctttactgtggcatctattcaaatttttctccatttttaattgggttgttggttgcttggttgttttcttaatactaaactgtaagtttttttatgtatactctcaacataggtcctttctcagacagatgatttgtatgtattttctgccagtctgaaggttgccttttcatctttatggtgactttcaaagttttttttcccccttttggacacaggcttttgctctgttgcccaagctggagtacagtgccgtaatctgcagcctcaaacttctggcctaaagggactcccaccccctgccttagcctcctgagtatctgggactacaggcaaacaccaccacacctgagtaattatttttatttttattcttttagagacagggtctccctgtgttgcccaggctggcctcaatctcctgggatcaagcagtcctcccgtctcagcttcccaaagcactgggattgtaggtgtgaactaccatgcctggcttcaacaacattttaattttaattttgatgaagtccaatatattgattttttgcttttactgttcattttttggtttatcttatctagaaattgttgtcttgctcaaggttacaaagaaaatgtctgttatatttttccttctagatttttttttaatttttatttatttatttatttatttttgagacagagtcttgctctgtcacccaggctggagtgcaaagacacgatctcaactcactgcaacctccacctcccaggttcaagcgatacccctgcctcagcctcctgagtagcgggactacaggtgcatgccaccacacccggctaatttttgtatttttagtagagatggagtttcactatgttggccaggctggtcttgaactcctgacctcaggtgatccacccgcctcggcctcccaaagtgctgggattacaggtgtgagccaccgtgcccggccccttctagaagatttaaagtaatagctctttcatttagatccttggtcaatttcttgttaatctttgtgtttggtgtgatgtaagggacaatggttatgttactgttgctatcgtgcatatgtttctcctcttgtccaagccccgtatattgaaatgaccagccctctcccgttgagctaccttggctcctctgttagactcactcttctgttctgttgatctatttatccatcctgatgccagtaccacactggcttgatttctgtaactgtatatgatgatgtctaaaactgtctttcattttgccaggtgaactagaaaattaaacaattttttttttgagaaactaaaggacaattactgcttggaatcattagtaaaacccagaaaactttctttctgacaattgattggcctagtttattggcttgtgtgctgcattatagcaagtcctgaaatcaggaagtttaaggcctgagattttgtttcatttttcagaattgctttggctaatacagatcattatatttccatataaattttagagttagtttgtctagttctttaaaaactttgatgatatttcaaaagggattatttcgaatctacagatcattttgagaattactattttaccagatagtcttccctctgcttggagtaccctttcttcctcttccccatcagacgaacccctgcccatccttaaagatatagctcaaaagactttcctcctctgggaagccttcctcaagttccccaggtaaagctagacaccaccttggctgtatttatgtctctgctatagcatacatcgtgttgaatttgaattagaatcctaaggataatgactgtattttattttttgatttttccaatgcctagtataaggtatatgccatatgcttaataattacttgtctaataagaagtaaatacatgaatgttgcaaataatcatttttagcataggtattttcatttgaatgactgttacataagtagtcactcctacagttagcagccatgtcttgatccaagggaatgtcagcttcccaaccaaggtatgatgctttctgtttcagaaaaaaagcttttgtatatgggtataaaatgatgaaacgttagacgttgtctaggacctcctcttatctctaaattttaaggaggtcacacagtaatttattatcagtctagaattccagtctgtcataatccattcaagagttttcttagacaaaactaaaatatacatgtatattagtttgctcaggctgcctactacagaccaggtggcttaaataacagaaatgtatttcctcacagaccagaagcccaagatcaaggtgttgaaaaggttggtttcttctgaggcctctcttcctcgcttgcagatggctgtcttctccctgtatctccagatgggcttccctctgtacatatctgtgtcatagtctctgcttcttgtaaggactccagtcatgttgaattaagttccacatatctgacctcatttaaccttaattaactctttgaaggccccatctccaactataatcacattctgaggcactaggggttaggacttcaatgcacgaattttaagggggcacagctcaacctgtaatactatgtatgtatgagtatgaatactcattataaagtttgttatattttattaaacacatttttaaaagtttattattaaaaacacgtcctaagggattgaaagaattccacattgctttagagcagaaacaggcacacttgtttagattagctacttaataatttgaagccagtttaacagaaatgtagagtctcaggtggtatccttcatccacctacattcttacattctgttgatgatgtgggacttgtctcttgtagtttttcagtgtgaagggtgccctaagtgcatttgtcaaggaaaaatttattatcagtataggaaattaaaattttatcaccaaaatggaatgatttatatttttagttttcaaaaattgatgagtgaataaggtgacttacatgttaaataatgttaaatccaaaaaatagatatttcccttaagaaaaaagttcgctacgcaggacaataagctattaagcaactgggatatttgctattttttttgtcgctttatttctagagcccacacagaaccaataattccaaaatgcatataccttgacccagtttctccctaacatttttttcttaacattgttatctaaacccttgacattgtacttcagattcattgtcaccataaatgcaagtccagaatccacctcctcaccttctcgtatgatcaagtacccagccccaagtggtaattcctcaggactcgggatttctgagtcatcccccttccccccctgcctttgaggactgttgatgtgtgggtaaggggtacacccaatatggtatttataactaaaaaatattttctatctgtgtcatcctttcaactttaaagttaaatgaatatgatctgaccgggctctgtggcttatgcctataatcccagtactttgggaggctgaggtgggcggactgcctgagcccaggagtttgagatcagccttggcaacaagtagaaaccccatctctacaaaatatacaaaaattacccaggcattgtggtgcatgcctgtggtcccaactactcaggaggctgaagtgggaggatcgattgagctcaggagtttgaggctacagcgaactgtgatcgcaccaccgcgctccagcctcagcaacagagtgagaccctgtctgaaaaacaaaacaaaacaaaacagaacaaaataccagaatatgacttttatcgcagtcttgataatggagtaaactaagtttaattacttttcatttgtcatatgactatggcacctttttgaagtcctcccaccaagataaggagcatggtttgaaaattggagagtgtattttgttgtttcttagactcatctctcaatacaattaaaaatgcagtttaatctctttttaagttttcatttgaaaatttcaaatttatagataatacaaaaataatattaagaacaccctttataacatctgtcacagttgagctattgttcatatttcaccctatttgctatatctccttttctgtgtctttcaacacacacacgttattcattacaattttctgtactatttaagagaaatttgcagatatgatggtcttttactaataaatactttagtgttcagttaagcaacttatattctcttacattaagacagtacagttattcaagtcaatttaacattgatacagtgcttttatctaagttaccagctgttttccaattttgtcagctgacccaatgatgtcctttgcagaataaaaataatattttaaattgaaaatttaaatattattagaagattgagtagtcttagaagattattatgtgttaaataatgaaaatatgaggggtctgtgatgaaaatattaataatcttcctgtcttcatcatttatactagtcctgcctgagctatgcaatggtaaaagttaggggtaccttattctgtatcttagaaatgaatagattaagtcaattactctggaaaattcaagatcgcacaatacaggaactcagacagaaaatgtaaatgacatatcacttcagcacaattaattaaaaactaagccaacattatttgtttgtggagggtgtgtgtacctgtgggttgaattgtgttcccagaaaaagatgttgggccctaatctctggtacctgtgagtggcagtttatttggaaatggagtccttgcagatgttatgaagatctaagttaagatgaggttttactggagtagggtagggccttaatcaaatctaactggtgtccttataggacgagagacaaggggaggagagggaagacgtacagaggcagtgtgatgtgaggagacacaggggaactgcccctgggggacagaggcagagactggagggaggcatctccaagacaaggaatgtgaaagattgctggcaacaccagaagccaggaagaggcaagaaaggctcctctcccaggtttcagacgaagcgtggcctttggtttttgactttctacctccagagctgtgagagaatcaatttgtgtttttttagttgcctggtttgtggtactttgtcatggcagccctagcaatctatgtgtatatgtatgtgtatatgtgtctgtttatgtgtgtatgcacctgtgtgtgtccatgtagctctgtgcgtgtatgcatgtgtttgtgtatatgcatgtgtatgtgtgcgtgtatctttgtgtatatatatgtttgcatgcgtgtatctgtgtataagcatgtttatgtgtgtatgtgtgtgtattcgtgtgtgtgtgcacacgtgtgactgttgcctccacctctctttactgaaatctccgtatggtttagtaactgaaggatttatagcaacagaatattgctcgttctcatatcctcaatgtaacacttggctaattaaacataaacctaacaaaattgtactgagaaaaacatgaaatcatttttagtacctttagactatttttaaagtttaacacttacagcgcaaatcaaaggaatgaagacaacctttttggaaatcggtaactaccatcctcattaggttcagatggagcttacagtgggagttaggtgggtttttatgcaggtggtgttcggatgatttctcactatttgcgaaaaatttcacatgttctcaattgatcctgcgtgactctctttacagcttaatatcaaacatttctccaactcgattatggcctcttgaagaagggtctgtgttttctatttctaaacaaaattcccccagatccccaatgcacattcaaataccagatggatgttcaataaaggctaaattgacatttaggcaacagcttagtgatgaatcttgtcttgcatcctgcattggagtgttccgtcctacagaataagagctgggtggaggtggagagcctgctcgctcctccagaatcagagctcggtggagagctgcctccttctccagcctcctcgagggatgacctggtgaggtgcttcatagccacatagggtctgaactctctcttgttgaagaaacaagagagactgggcaagtctggcttgtaagtctgactggggaagttttgctgctaaggagggaacctgtccatgcagagttcagtatgagttgggaaaggagaaatgatgcgggtgctttcgagtccaaacatcatgcgctgcctctgtcctgtgttcgggaagccacaaccgtgagtgctgttcctgtgtgcgatatcagggcccgtcagttccaggagcggtggcctctgtgggaccctctgctgcagatgggcaggctgcttcactactttggtgtctagctgtcgctggtcatgtgtgagcaactgtgttgtggggcaggttggtaatgacatggctgcttggacgaccaatcacgttgatcatcagaggccttgattttgaagtggacagaaaatgaatctccaatatttacgatggaatttcttttttgattttgcttctgggcaccagttcatcccagaaggcctatgccagggagtaggctgctctgtggggaagaactcgtcgaccctaatgaggagcaggactttctcttggctaagcttgctaagcagagctgctgacaggcagaagcagcacaggtgtacgtggacttgctgcatttagagtgttccaggccaggtggacccatggggcaaataggagggacagcatctattcaaggtggagctgagatggataccatcaccactcccctccacccccaaccaccccggctctccatcaacagctgtttctcctgcaataaagatccttcagacacatcaaatgataattctcctgtgttctagaaaacagaatccttgcctcattgtaaagcaaatgaagtcagaagagtgtgcaaaccaatgcacacagaggagccgggggtagtgatggccatcggagggcctgcgctggagccctggaagagactcactagagcaacaggaaatagtaaagacaggatctggtcatcagaagatgaaagcacaaacagggagctctatgtgtacatgtgtgtgtacatgcatgtgtgtgtgtgtgtgtgtgtgtgtgtgcatgtgtgtactcaggaaggccacagaaggagggctccctagcgggacctcgatggcatcctcagatgcttatccagaagaacgcttccagatgtgatgagggtataaggtctgtgaggatggatattggaaaaggcactgcttctgtgacacgatatggaaataagcatcgagtaaacatgaagaacgaagaacaggcagtttcaagttgaggcgacagaggggatttattgacttggggaagatgatttttaacataccagctgtgaattgagacacattgtttctacagtagcccaggcagaaaattcatgactgtattcagaagcctcccactgttaaatttcttcaatttgcattcttttgtagtgggaggcaaagtggaaatgtggtttagtggccatacgataacctagattctcatgacttgtatgttgaaactcatagtctgaatgatgccaaaccactctgtcacctttggcaagttatttagtctcagttaatagtccaactttcttatctataaaagtattaatagaaattcaagaagacctatttacatatgtggaaaatgtcaggcttagaaagttgagtactggattaggcccttctgccatagcactgctcatagacagcaatagattgggaaaatagaatctagaatttgtttccaagtgctggaagatgtttgaaactttttcagtgttttgtggttattattgttgcagaactctaaaacgcattgttgggacaatgtgtagatgcaacagagtttgccaattaatatatagctaagtgttattaaaatagatatatgatttattttctatgaattgtcaaccttgtctccaaatctcttcaatacaccagagtttacttcaatccttccaagttaccttctccttctccttatgggtccaacctcaccagtggaggggagggaaggggatggagagggagttcagaggcagatggcagaggcagatttcagatgtccttgcaggatccagagctgaaggccaccagccttgccttcctcctacatcgaggcacgttggtggagctgccccaaagattctgttctgaaacctaaaaacagctggcagcatctgagcacctgcctatcagtgtccacactgctcatcaccagagcctcatagatcaagttctgctgctgcatcaccccaagttcattcaggccccattgtcctctctcctcttgggtgtcgagcctgcattcaggtggctcagtgtcctgggagatgggtggatactctgcgctcttcattattcgtgattgttagggaacccttgtgctgctcagccaataatgaccttcattgacattgaaacctgtccctgaggcgtccgtgcacttgctatgtgttaccgtcagtgttctcctgctgtggcagctgcaggtcacctggaggctgtgccaccccccatgtgtctgatggcagcaggcccacttctgacctctacacatcggcaacaccgcctccttctttggttccatcttctttcattccttttagcgaaatagtacctgacaaactcctgcttctcactttggtgggggttcggacttgaggtctttgcttcctttatgaaatgcatctgtgtcgcagacccgccacatgccaggaacttaggaggcagcagtgcggaaaagctctcggccctaatgcagcttcccttcttgtgataagagacagacaataggtcacacatctaataaatcggtaactgtacagaaggtcactggtcagctatggctgagtactaagaaaccgggcagctcactggcccctgacactacgtccagccttctcacacctctcggctccacccgagttgagctggggctgggctgagcttggccctgcttcgggcagtgaatgtggatgtttccagtctgctcaatgagtccatcatccttaagccagtggctacccaaggacagttcttctcgtggtgaaaggcaggaattcagaagggcaggcctcaccaaacaagcacatgccacgtactggattatgtcacatacactactatcctattggcaaaggaagctgcaggggaggcaaagcttttcttctacccagagtcccaactgggcctgagaatgaaatagacaggaaacagatgaacaggaggaaagcatgcaagtttaataaaagcgttatgtgacacaggagccctcattaggaaatgaagacccaaagaagtggcaaaaccagcattcttttgtgttgggttgaaccagcagaggcaattgtggaaaagtaactcaagtgtttggaggctaagggaagataaggcatacataccctaatgagggctgtttgtgcagaattcactctgctataagtcccaattgaagagtggtttttctcctcatgcaaggagggtgtctttcacatgggagttttcatctcctgtttccaggtataaaaggggagatcagaacacccttctcacatcacctgtttttttcaagggcctttagctttaagtaattatatggccaaaatggcatattttggggtgacatattcagccaccctacaaagccacgtggctcagctcaccatcaactggatggggaaatatatgcagcttctaactgaggaaagacaaagtcaggtcaatggctggggaacagggagggttgaggcattgcgagtaagaaggcaaatctactataggaagtgattgatgttatggagacaaagactaaaacaggccatgggaattgggaatgtgggaatgtagggtggggtcaccaccgttttacatgagcaggtggtggttagaggggctcgttgcaaaggagacattggaagagctgcaggagggcagggtgtgagccacgtgaccattggggaagcacgctcgcacaggaggagccggagaaaggctgggagccaggtgtgtgtggggcatgtgtgggtcatatgtggggtgtgtggggggcgtgtgtgggtcatatgtggggtgtgtgtgtggggcgtgtgtgggtcatgtggggcttgtgtggggtgtgtgtgtgtcatatgtggggcctgtgtggggagggtcacagagttcactgagcctggatcacagcgagtgggagaagagaaggagctaagggacagagaaggggcagtgtggcaggcttagaggatggattaaagtcaccattaggacttggacctttttctgaatgaccagggggagccattgcagagactgagcagaggagtgagaggctataactttgattttgaaagcatcttctggttgctgtttggagaataatgactcttcctccaatgagcctttgctgagattgacactagcttaggtcagcctgttccttagtcttctctactcctctccattcttgcaactctcggtaacacttcatttagcacgaattccttgtttgtgtatgtcaccttccttgtgaatctgcaagttcaatttgaggagaaactttctctgccttgcctgttgtttaaccctcagcacaaccattagttgaatgaaggaatgaaaaccagaaatacctgcttgtatgcaagcagattccagtgggagacaagaaaaagaggggtcccttcattacatcccattgttcacccgaaacctggggtgcccagtcctggacacacgcagttgcacaggccttccctgcgcctcacatctgaagcagctggagccggtcctggtcttgactgtggggaagaaagagcttccagtgaggtgtgagatggaaggttaaaaccggctgatctaaggcccgttcgattattttcataactgaaaagcagccacaggtaaaagtggctgaaagtcgtggactctaggttgttgcccactgtgtttgacagatgcacagaggcaggtcttagaaaccgtgacactgttcgatgtttatagctcaataagttaaagccccgtaatcaaatcagtcacacggtaatctcagcatttccttggggtggccccacccgctcccatggctgtgattgccatctctccatggatgggtccccaggccctttatagccccatctttctcccgaaagaaccgtgaactaaactgacttctgcacatcttcgctgggacatcccaaagccatctcaaactcagcaagcctagaaccagaagactcagtttccagccctgctgctcctccagtcactgtactgtgtcagcaaatgtccgtagcatccgcagaggccgggccctggcatgcggaattgaggaatgtgggtggaacttatgcagcgctggctctggtgcctgctccgtcaccggtgggctgtggacagtgggtgtttgatagcgccctaggcctccgtttcctcccgtgtccttctctatggtagggatttcactgttgttgtcatgggaggggtgggggagccatgcattcatgcattaagccactatttttggagctcctcctaggtacaggcccagcattaggcagtgagattgcagagaaaacacaggagtgggccctgccctccagaatcattctgcagatcattctgcagattaaaatagtgatgccgagaaagcacttagcaggaaacatggcacattagaagcattcactaaatgatgagaagagtcaccagacattgtgcctgaatcccctttctgactctggttaatgagtctctgaatcttgacaattttagttcctaaatatctgacacctcccacttttgtcccccagtgccgtcactcccctgttgaagatatcagctatggtcccccaacagcctcacggggcttcataggccagacactgcccacaacaggtcatcagtgggagcagagcccatgcatcccatgcccactgctctgtgcccagcactgggcatggtagaggggatcagtcaatccagtggatgttttttaaagggagctatagttttaaaactgtattaatatagtattttgttaccaggctcattatcatttaatctgggctctaagcaaagattttaaatttgcttagaaccagaaagggttcatttccatttaaagtaatatgaaaggtgtgacttttagaaccatgaacccatggatgttggggcatgattctgagatttcctaaaaagcgagaaatctgcaaatggtagtaggaaagcaaagctaggtaggagacatcaagcactcgattgccccaaacatattgtctacctgtcgttgcctctccctctccactgcttgatccacggcactctcttttcttacttggatggctttcaccatgtccatgcatctcccttcctttgtagccctgctccagtccattcgttacctcaagttagagtgattttttaaaacataaatggtattatgttgcatccctacttaaaattttgtcctgacttgccattgtccaagcgctgaattcctgagtatgtcttaaaggccccatgtggcttccttcatctcctcagacctcatcttgctccactgcctccttggtaactgtgtccccaaaacactaaccccctgattaattcttcacaaatgcccagcattcctacctaagtgcctttccacttgctccttccctgcaaaccctcttacgccagacctgcacatggcttgtcattgagatggcaatgcaaatgtcccatccccaggccttcccaggccacccagcatgggcagtgcaccagcactatcacatgatcccatggcatttccttgctgtcacttttcattgctagtttttacttgtttgcttaatacctatcccttccaatctgaagagacaatgacatcctgaatgctaagtgcctggcccatagtaggcatgcagtacatttttgttcaataagggaatcaatatgttctttgtcctatttgccctcttcaaagttcttgtgccttttcctttccattatgtggaagtcgcaagtattgggtgctctccaaactggactcagctctctgaacggatgagcctaactctggcagatggggggagatggtgttttcagcttttgacagcagttgaatggcttagctcaaaaccagtcatctactgcagacctctggacactgcaaaaattgttgtttgcctcgcttttgtccctgttccttgatagtcattcattccttgagtcaaactgtcagtcactgagaacataaacattgaccaaacaccagccacaggccaggcattgggaatacagaaagatagccctgtgtttgtggagtcaacagcctcgaacaggaataagcaaacatgtcctgataagggccaaataggaagtaacttaggcttggtggcccatctaggacctgtcacagctagtgaatgctgctattatggcacaaaagcagccacgagtaatatgtaaaatggctggcttccaataaaactttattggcaaaagcagtctgagggccaaatcccagttttctggcctctagtctggcgagaacatagacattgaagccagtgggtgagtaccccggggacctgtgatgaaaagggtgagggcagtgtgtgggggagccccgagcacagtggaggggcgcctgacccagggaggcccaggctgacccagggagcctgtctgcacaggctcttcttccatgtaagcgtgcctggccctggtgatcagctgacttagttgaaaaaagaacaaaggagccttaaaactaaaagctatatgtaatattttgtggccttttttgtttttaacaccaaaacatcttttctgatcttcctggaatactctggatcaagatctccctctcataagtctcccagggagtaaaatctctagaaatctccagtttctcacccttgcttgcagcatatgcattaattcaagaaaggtgaaatccaaaatatgaataggctttgtatgtgctttcaagtgaggattaagtcctacaagctttcgataaaaaagaaatgttgtgatcatataaattgaagatggcaatacctctatatccagaaagtctctggagatggtcccatctaacctgctgatgtcacaggtcctcgtttcacagaaatgggattctgaggccagctaatgctgcagccggctcacaccaccctcctagggctctttacaaacctcgctcaaccaccagctgcatcccatgtgctgggtggacagtcacatctttgcatgaattcctttatcttgggtttgcacctgaactcattttttttgtttgtttggtttggtttgtttgcttgtttgttttgagaaggagtctccctctgtcacccaggctggagtgcagtggtgcgatctcagctcactgcaacctccgcctcctgagttcaagccattctcccgccttagcctcccaagtagctgggactacaggtgcgtgccaccacgcccgattaattttttgtagttttagtagagacagggtttcaccatgttagccagaatggtcttgatctcctcacctggtgatccacccacctcggcctcccaaagtgctgggattacaggcatgagccactgcgcctggctctgaattcattttgatttgtattgttatgccatattgatttttattatattttggaaaatactttgggatggtatacaatccttttctggatacacgtaaaacaagcaaaaacaactaagttgggaaaataattttatctactatatgccagaaattcttatgtcaatattttaatgctgaactcatctaatgataccttagaaatttcacagtaccttctcatgttgagacattttcattgttgaactgttttaagatgtctacaatcttttcggcagactcctcatttcaaaccactctacttcagacaacctgatttttaaatattcctctaataaaagaaataaaaggcccactgggcacagtagctcttgcctttaaatcccagcagtttgggaggctgaggcaggtggatcacttgaggtcaggagcttgagaccagcctggccaacatggcgaaaccccatctactaaaaatacacaaattagccagatgtggtggtgtgtgcctatagtcccagctacgtagggggctgaggcacaagaatcacttgaacccaggaggcagaggttgcagtgagccggaggttgtagagccaagatcgtgccactgcactccagcctgggtgaccgagtgagactctgtctcaaaaaaacagaaagaaagaaagaataaaaagaaaagaaaagacccagcatacgattacattcattcattttaagaatgaatgaaaaaccggtacacaattgtttgtgcagggttttggtgagtcaacagcaaaagatgtatctttttaaaaccactctgtgtctgaaataatttcttatgttaaatagcttctaacatttatggccactggactgattcttagcacattaattcttcctgtcatgaggtttggggatacatcagaacaatttatttcacagtggggttcttatccaaacaagatctgtcttcatatctttctcaatttagcagaatgcttttgcagtggatctgggcattatctgcttctagctgttttgcacagaggcaaaaacaaagacaagatatgtgcatgagttagtatgtattacagatggcatctccaacagctaaatagttgtgccacataacagctctgtgcaaatgatatgacccagaaactattttatgttaaatctggcttgagctttttttagttatacatatcgacagtctgaatagaatgtgacctgaaattagagtctgaagaacttggactattataaacgtaattttgagcatccttgaaaaaacataactccattaactgggggataggaaagtatcgtgataattttttatgagctgcgtttttctcccatgggccaaataccctttggaatttttagtttcttttcttttctttttacacgcaacaattatttcattatgatttatccactatttacaattacatgtcagtgtctgttttctagtataaaagcctcggcaagaaagctagggtaaaccaaatcattctaacaaattactacaaaacaggactgacatctttgcttttaacttactttttaaaaagaacagaagttaatttttttatttctaatatctcttgttacattgtaatgttttcaatctagcactttgagaagttaatgggttatgtttgggttcaacctgtcaacagtaattatatttagaaatgcaatacacaaattagactaaaggcaaatgggtatcttccaggactgaaatcatctggagaaaattaataatacattaattccatcttgtaatcgtggctttgtatttctattttgcgtagccagtttattgtcaatggctcaaaatgttgtaaacaatggaacccaattcaaccacacttgggatattatataaacctaaaacgcagatttatgtatgtggcttatagaagcattatcattatattttaatataatttttaatttctggaagaatttgggactttaataaagcctgagaagacagtatgaaaataccgtatacagcatggttccctgatcttacctaattttactccatctgaagtgttttcacatctttttcccacttccctatagtttcttggtcaggctaactcatttttgctttttcggccttagtttgtattttccttctttcaggaaatatcctgtgcctgaccaacattggactgagtggcctcttattagatcttccaaggtgtccctgactgagttttctcatcatcagacagacttcctgagagcaacagctgcatccccctctcaggtctagtgcagggaccggtgcatagtagccttccaattagtatatgttgaatttgagttggagagacctggtgcaggttcataaagcaggtagaaaacaatacaaaggaggctggactcggtggctcacacctgtaatcccagcactgggaggctgaggcgggcggatcacttgaggtcaggagttcaagaccagcctggccaacatggcgagaccccatctctaccaaaaataggaaagattagccaggcatggtggcaggtgactgtagtcccagctacttgggaggctgaggcatgagaatcatttgaacctgggagacgaaggctacagtgagccgagattgcgccactgcactccagcctgagctagagagtgagaccctgtctcagaaaagaaaaaaaaaaaaaaagaaaagaaaacagtaatacaaataacatgtaataatactaagttaggccaggcacggtgactcatgcctgtaatcccagcactttgggaggccgaggcgggtggatcatgaggtcaggagattgagaccatcctggctagcttggtgaaaccccgtctctactaaaaatacaaaaaattagctgggtgtggtggtgggtgcctgtagtcccagctactcgggaggctgaggcaagagaatggcgtgaacccgggaggcggagcttgcagtgagctgagatcgcgccactgcactccagcctgggtgacagaacgagactccacctcaaaaaaaaaatgctaagttaaatataaaagcaatactttctaaatgtaaacattacaagaaattagacagtgaatagcacatcgatgttatctggagttttattgaaaaagcttatgggggaggttgcgcctcagctgaaccttgtagttttggggggaataaggactaagaggaggagtcttgcctgtagggatgggagcataaggaagaaagcagcaaagagactgacttgagagaaacagagggattcgtgaatgggaaagagggaaagacattccatagggtgaatccagcttatggaggctccaaaagatagaagaaaaacctgaggccttaatacatgggcactgcgaaactagttcatattttggggccaagaactgtcaggatggaagcctctttagaacagtgttgctggggtgagctgctgggatcagacagggggtccagggagggaagaggggatggagacagcctcggtgctgatgtaggtcttggccagacagacgctcgtgagaattcagactccgccaacactcatgagacctaatccattgctctggggcacactgcaccgtggccactcctaaatcttgactcaattatttttatagcacctgtgttgcagactctcaacctcagcaggtatatattgaagggagtatgtctgcaacagaaaaagtggctgttacttgaaacttttctatttcctttcatgacagtaaataaaatgagttaacctatcaatgggaacataattaatttgatagggaacttttaaataaaaaaattccaggtagacacaagccaatgccacgagatgcataaaatcaagtcgttgcccaggagtgaaagggaacgtgcctgacaggagggtccacagagtgccgagggcagatagcagcagagtcaaacttggaaacaaacaccgaggttagaaagtctcttgaatttaacaatattgaataccccagatgggatgttgacttactggatgagaatttaagaggagaagggaactcttaggaaaggagatagagaatttatattttcataatcctttgtaacatatttacaatattattttatgtagtaatttgttaaaaacctttataaacaggaaaagccatttagtttgttcagcctcttctcactatatagactggatgcactgagccatgagctatcttgggagcccttcctccaaccccagagataggctaggtgtctccaaattcatccttatggtagtgcttaccacactatgaataattaattatttgtcttcaactctatagactgtgacctcctgaggagatggaacattcttgttcacttttataggatgtgacatgacactgcctggcatctagtggccggtccactgtgttggcagaatgggtgaataaaagtgattcaaaaatgtagacataaatgaattttaccttggctacgttgtatatgctgaaatattgggacttctgcaaataagcttacagaaccaaagtaaaccctcttccatgcagcagagtggactggataaaacagggagaacatgagcagaggaggcaagaaaaaccagaaggggtagttagtgagctgattcaggatctgccagtgccttaataggactgtgattctaagcaggccaatggacaactgaactgatttcaggattttagacttggctgctggaaggaattttgaagatcattcaactgttgaagcttatgttaatttctaaaagttgagtctatcaattagtatctcggagcaggctcctctccagtgaggggggttgctcacttggctaattcaaataatgaactcatacgacccacgtgggctgaaatgctctctctggcattgttgtgggcaggcgctgtgccggttacttctttgtcagtcgtgcactttggcaattagtatgtaattttgccaaatatagatcaaattaaaatgcatttggtctctgagatttcagtcatttatttcttgtttataagccatctctaactaaaaggggcttaaagtgacagtcgttaagaagataaattcatgttttttaatggtgtagctttcctcttttaattacttttatctaatcaaatactgtgttaaatgcccaggagtcatagttctccatgtgtggagtttgcagagagctttgaaagattgctaactggggcatgacttctgtgttactattgcacaaactaagaacagtggaaacaatgtgtgaattttcaagggtcaagtgttagctaaattgcaagactctctccctcaagtgaggaaatttagtttttatttcctcaaggattttgcacgtaatatttttattttaacttgtgctgcttttcattgcatttcagatgctgctgctcttcatacatatgtaataactttgctttccactggggagaatgaagaaaccagccactcttgataactgagcattctcttttcctgctctgtgctttcacagctccattcttttctcttgacctcaggtgttgtctgcatctttatgcactggaatcctgaccgtttttcaaatgcccctacattcatgaattcttttctggtcttcaacctatatatgacctcctcctcctctgaacctgaattagttagatattgctgaataacaaagtatcccataacttagtggctgaagaaaataataaacattgcctctcacagtttcagcaggtcaggaatttgggagcaagttagctggatagttcttgctcagggtatctcatgcagttatagtcaaaatatcagccagggcttcagtcatcctagggcttgccaactggctgccaagtagatgccagctgttgttagaaggccccagtttcttgctacatggacttcaccatagtactgcttgagtgtcctcccaacatggctgctcgctttcctcagagcaagtgatctgtaagagcacagacagaggctgcggtgtcttttctgacctactcttggaagtcacacattgccgtttctgcacttttcctattgcatgtgagtcaatccattcaatgtggagaggaactacagaggaggtggagctcactggagaacatcttgaaggctgcttaccccagagcgtgagcgtggcaatatatcctatctctctaacatgacttaaaatattctgtcctgtatagtaagtatttgtttccctctcctgcccactctactggatttatatgtccttgagagcttagatttgcttcctcatctttgcatagcttgaaatatctggcacattgctttcgatatatgtcacatttcatccacagcctctctcttaatgagtataaatgaagatgtacacatgggaaagaatcaggcaaatggagagaaagagaaacagacagattttgccagagagtgtgtgaaggagggcaaatgagagagaacaaacaaggtggacagcagagtaaattgcacatttttctagataaacataaaaactcgcatgctatttttgtagatgctagaatactaactttacaagaatttaaatatttggaacactgtgtaaccatattctacttttttaatgtatgtgaatgacttgccacattatttgtaactcaaactccttcaattgtgcttaaatattctgcaaacaaagggtcgctttttatcaaaacagagaaatcattggttacaaataactctttggcattgtcaaggaaagcatttataagtctttttatatataattgagaactttacttaacctttaatttaccgctctttaacctggcccattggggtgaaatcatctctggatcgatcaattaacatttatatgtagataattagagcaaagggcacacaggaatgtcaggaggaacaaaagacccatgagaggataagtcctggcgggtcctgctctgaaatgtcacccgttcttcttctcatttccactcccagagccatttgcacatcatagtccagttcttagtaactcatgtctaaattatcaaaatgacctcaagtagttctcactacttccagctttccctccatacttctgtcggagctaaacttactaaaacatcattcccttcccatgtttaaaaactctcttagtacattctggctgctataacaaaatcccataaactggtggcttataaacaacaggaatttatttctcacggttccggagactgggaagtcctagatcaaagcactggcagatccagtgtctggtgagatccccacttcctggttcatagacggtggcttctcactgtgtcctcatatggtggaacgtgtgtgggagctttccggggtctctttaaaagggcactcattttattcatgagggctcttctctcacaccattcacttcctaaagaccccgtgttctaacaccatcattttggagataaggattttaacatacgaattttggggaacacaaacattcagaccatagcagaaaccttcagtgaatcccacagtctagaggccttatgctaggtgtgtctcctagagtcaaccctgatccctggccagaatctcctctgttctcaactcttttcatcttgtcccccaccattttcctgatacatctttttgatcagcccacctgatttctcttctgttccaagcatacttgcatgtctgtgattccttcctgcttagaaacaacatttctttccagtgaccaaacatcaatcctcccgtttctttaaattcaattcaagttccctaatggatccatcctgactcaataattctcttttcctaactttcgggctcccagagtttggggattacagatacttccttgtaatacttgttccatggtaatcttatgtctctcaactacgccctgtgattgtgtaagccaagtataactataaggtatttatccactcactgggtgctgtagtccacatgcatttactaagtgcctactttagtcaaagtagatgttcaataagaaatttagtgaacaacatgtaaatgagagcagagaaattataaaagtatgagaaactacaaaaatagtgacccattcatttatccactagaataatcaataactcttgattacaaaacgatcaggtgctcagcattgtatttgatgaggcatgggtcatgaaagggttaagcaagtagggtctctacaatttcatgacttttcatttaatgttgatagctaaggaaggagtatatgaaacactttaaacaaaagtcaggccagtattgaagtacattacagatgaactttttaaataactattgaagaaaggtaaagaaaaagggaagaggcagtgaggtgttaggctccagagaaagttccttggagatctttagtcttgaactggacctaggaatttgtgatttggctttgaatatgaaggtgagtattaccgtgagactagatggcaaagagcatgcatctaggtgtacaggaactagaagaatcctaggctacgcaaggaccttcccagctggaggggacggaggtgcggagagaacaggatggacggtaggggaggggcagtttattttacgaggatgaaatgaaaggaagtctgcgaagttcctagcaagccacctaacccgaagtaggtgcccataaacactagctttcccctcctctttgatttagcatttaggaagttaatgatgtagaccttctagccatgaaaagatttttactcctttccttaggtgattaatctaataactttttattggtgtcatgtttattcctcacctaactttccaaaactacaaggaatatcttaataggagaggagcaatcttagctcacagctgtatcaagaattccaggtgactgataattctatgtgaaatgcacatatacaccgtctttataacattatctgtgtatgtgcgtgtgtgtgtataaaggcagcatatatacttttctatatcttcatctgtgtatcttagcacatacattcatatattgatatctgtatctatcatttatctatatctgtatataggtatatatccaagttgactgtgtatgtatagtaatagacaatcagaattcctgaatgactcatttatcatttttgactccctgtaacttgtaaatttctttcttttccgaagaggacatgcagaaacacacacaacattccagcttccccggttgcattccacacctgcgtctgggcagtggcgtttcttcaagggagttacatgagtctctgtcttcacttccaatgctagtcccttcactgctcactctctggtaacccactgttacctggtgccaatttctcctattttttattcaaggtagacatcctcagttcaaggaggttgaggtggcctggtgcagctgtagcttagttttcagtaggactcttcctgtgtccctaggaagatacacttcactctgtgggaaccaaaactctggacccaccgcatctgcagctgtctatgcttcactgccagttgcaggatgggtaagatggactatttatattggaaggtgtgcacttccaggccccaagacttggacctctaaactttccctaatgtccctaatggctcctgtcactgcacagggttgatttcacaccatggccgccaacgtagtgcttgtttcttgttaatgttctccaaatagcaggatgtcattaatagagtaggacaattgatgttccatgtgttgtctagatggtatgagtcatttgggatcatattaaaactgaaggagacaactatagaagtgtgctgttgtccatccatgtgagagagaactcttctaacaggaatggaaaagcctgcagaagctacactgatggccgcataccacgcagccatggctttctgggccactgtggcgggagttcgtgggctgaccatttaggctctgtaagttttctttatgtttcctctacagggtcatttctaagcttttttgtttgtttgtttttgaggcagagcctcactctgtagcccaggctggagtgcagtggtgcgatctcggctcactgcaagctcccgcgttcatgccattcacctgcctcagcctcctgagtagctgggattacaggcgcccgccaccacgccgggctaattttttgtatttttggtagagacgggctttcgctgtgttagccaggatgatctccatctcctgacctcgtgatccgcctgcctcagcctcccaaagtgctgggattacaggcgtgagccaccacgcctggcctctaagctttctttttaactttgttatatacaggcacattttcataaatgttctaatattttctccatgaattagtagcagattgggaggtctataaaggttttagtctaccatgttgctgaaagcaagatggagaatatttttcacataacagctgtgagagaaaaaggtagaatacagcagcttcatagggtcgcaaagtgaaaaaagtatgtgtgtgcttgagcatgtgtatgcgagtgactgtttggttagaaataggaaagcattatgaaggacttggataggttccaagaggggaaaggagaagccgcacctttaggtgcgcccttgctcagattaagttgaccgattacttacacatccatggcattaaaataccaaggaattgtattttctttgtttgtattacatattgctttgaagtaagtgggataacagaattttgaaaatcttttaggtgttaagaaattatcttttatattattagtattattcatttctctagaaaaagggcttttgaagagctcttataggcgttaaagattgggtataaaatgaacatgtttattttgtattttgttacaattacataggaaataggcttatctaaatagactccaataactttcttactattaaaatcgccttggggctgatttcaaattcatgtattgagcttgtctcctgtttgacataaacttgtgtggttcgttttccagtaaaaatacatggcttttaagatttttttttctacagagtattttaaagggataaaaaaaattaggatttatatatattgattaattagtaatcccataaccatactctgagaaactgaatatttggatggtttcgagatggcacaatagacaaaatcttgcagtagaagaatccctgttggataaccttttatccctaaattctacttttttatttgccaataaaatgtgagaaaatgtttaacgtttttactttgatgcaatagtaatttttcttttgatagtggggaaattcagattctattgttataacatagttataattaaattaccaaggaattttattttctttgttttgtattacatattgctttaaaataagtgggatagcagaattttgaaaatctgttatttcactgttgaattttctctaattatgtttatgggattactagtaaatcactatatacaagtcctaaatttttttgattcccttaaaatactttggaggaaaaaaatatttaaaatgttttaaagatttaaatttttaaaacattcatttaaaactttacaatgcctggtactatgggaatagcaaaataaacataggaactactttccaggagatcacagtctatgagaaaggagaagatatgaatactgtggtgtaataacggatcaatagaaatatatacaagcagatgggatgatttgataggttaattgggaattctgagtcagggaagacttccagaaagagattatattttagctcaggtttaatcaaaagattgataaatgtgttaacataaaaaatgtaaaattaggagaatcagttttctatgtagttcattgagtgcctccaatttttaagatgttgtgttggtatacatgagcttaatgcttagcagctccggtctttgcacagagcacagtctacacaaccctccaggattacagaaattggtctaaagcacgtgctgcctttccacactgacaggtactagaggaaacatcttcctttctctctgcaggagccccgtcctggttttccagtgcaactcccgccacgtgatttgcttagactgtttccacttatactgtgtgacaagactcaatgatcggcagtttgttcacgaccctcaacttggctactccctgccttgtgtgggtaagtctagcatgttttctctccatctctaatgctaatgaagaacagaagaacaattattgatgtaaaactggcttagatatacgtaaaccctagcagaagaatttaaatttgatcattgctggatatgaaacattaatgtttggatcgcaaaagataaaagttctggggaatgaaggaattgtgttgaactggaaaatgcattatttgcataaaggcattgagaataagtttgtcaatattattcagccaaggtatactaagtttttctgtgggttagagtcactctccatgttctagatttgttaccgtggaactagagcagtattacctaatttttaaatcgtatacctctatcactcaaaatgttgaacacatacccaatatatataaaataacatatgtgaaaaagaaagcagaatgagataaacctgaactacttaatattttatcttttcacattacaaagcaccctttacttgtactatactgttattacatatatacattttaatggaagtgaaattcatgtaaccaattaaccatttacaagtgtacaattcagtggcattttgtgcattcacaatgttgcacaaccactacctctgcctggcttcaaaactttctgaacacctcctacccagctaatcactgcctgtgaccccctgtcctagccctggccaccaccaatcactttctttctctatggatttgcctattgtaggtatttcctataaaagaaatcgtacaataggtgacctttcgtgtctgccttatttcacttagcatagtgtatttgaggtttattcaagttgtagcgtgtatgaatatttctttcctctttgtggctgaataatattccactgtgtggataccccacaatttgtgtgtccattcatctgctgatgggcatttgtgttgtttccgtctttttggctattatgaataatgccgttgtaaacattcatatataagtttctgtatgaacatttgctttcatttaccttggatatataccgagaagcagaattcgaagtttaacctttaggagaactgcccactgtgttccacagctgctgtaccgttttatattgccaccagcagtgtagcaatgtcccaggtttctctctctccacattcttgtcgtcacttgttactgtttctaactagtcatcctagtaagtgtgaagtggtgtcttattgtggatttgattttcatttctctaatgactgtgatgttgattatcttaattcatatctcttccttataagaatgtcggttcaagtcctttctttgctcatttttaaattgagttatgtttttgttgttgagttgtaagagttctttatatattctggatactggatccttaccagatataggatatgcacatatttctcccattctataggttgtcttttcactttcttcataacgtcctttggtgaacaaaagtttctagttttgatgaaatgcaatttatctgtttttgttgttgttgctaatactttttgtgtcaaacaaaagacttcattgccatatctgagatcatgatgatttgcttccatattttctaccaatagcttacctcttgtatttaggtcattaatctagtttgaggtaatttatgtacctggagtgaagtaaaagttcctatctctctctatgtataaatgactgcaatgtgactaaatatgtttcattaattcttcaaaacttaatttgaaactatgggataccttgactcaatggtgaggttttaagttcaatttatttcaagatttagttttaatgtcaattatagctgaaaaatatacctccaaatgataaaaagatccaaatggaataaattaatttctttgttgactttgtaaattatgatactcacttttaagcatatctaccaataatgcaatgatttttaaaactaagattcacataatatatgttaacatattgttaaggaaaacttgttgaaagttattgtgcctttctttttaacaaaagcatccaaaatctagtgaagtttattatttacagattggaaaactctgtaatgcttttaatgtgacaattttgttttggtaagccttctgccttcacaaagccacaaacaatagaaacatttctaaacacacattttcaagtcttcccttcacactctatctttttagttatcagttcattttgaacccattttcttttaatgtgtatctttttattttagacgatttcaaacatacaaaagtaaggaaaaatactacagtgaaccttcctgcacccattagtcaggatttgcagtgtaccaaggtgctctcgacctttcttgtaattctcgccgaatgacctgcaagcagccatttttctcaggacctctggctccctttcgtaggaaatagtatttaaaagtcttggtgcttggaatgctcattgtcaccatgttggttactgtttctaggcctagtggaataagctaggagacttttttttttttaagtacaaatgcaatattagttatactaacattttcagttcaaatccagtgttaccaaattttcattgaaaagtcaccaatattacaactgttgtttctttcacccttggcaaaaattctgttactgagtgataccaacaaaattactcatttgccttactttggaatgcacccacaacagtatcagtattacagtatcgacaccatcacctaagtgtgattattgaaaacaatgttaagatttttgcagtttgttttgtcattagggtatatccttatagggatataaactcatataagttaatgtatagttatgtcatcaattgaatatgtatttctcattgcttttttttaaattttttaattaattaatttatttttttgagatggagtcttgctctgtcgccgaggctggagtgcagtggcatgatctcggctcactgcaaccttggcctcccgggttcaagtgattctcctgcctcagcctcccaagtagctgggactacaggtgcatgccaccatgccctgctaatttttgtatttttagtagagatggggtttcgccatgttaaccaggctggtctctaactcctgacctcaggtgatccgcccacctcagcctcccaaggtgctgggattacaggcatgagccactgcacctggcctttcattgcttttaaatttattgtgttttcataatatgtaaaatatttccattattccaaagcaaaagctacaaaacatgctatattcaaagaaatacaccctttatctacgttctctttctctcccaaaggtaaataataaataaataaaggtaaataatattccttttctctcccaaaggtaaacgtttattaaaaacaatcacctattttaaaaataggtaaacatactatagatgatatcaaaaatggtatagatgtgtcaccttcttaagtagaaagtagattatacacatttttctttaccttgcttttttcactctatagtacctattatattttaaagatcactccctagtccgatatagatattttcttacatataaaaatatatagcattattgaattcctttgtgtaggtatagcttactttttccttactggcaaacactaagttttcatttttttactgtaaatattgctacaactaatagacttgtgtgcacccgtattttcatattgttgtcagagtattactgggatctgctccctagaagaggggttactgcaccaaagggaaaatgtgtatttattttactgtttccaaatttctctcccagtagtggtgcgctttccatgcccatcagcaattgcaaagtgcagtatcaggctctccacttcctccccaacaggggagccgcaaggcttttgctttgtttctaattatatatttgagaaatgttattctatgtagttggctgtatgtttctttttaattttaaacaaagttgagcatcttttcatgtgtttaggatcctttggtgtttctttttctcagtcatgttgaaaacatcaccttttctttcagggacaggttacatatattattttcaaaaatattttctgtatagcacactgttgacagccccttgtagatacagaaaagattagcaaagttgggtcacttgtaaagaatgtgcgtaaattaactttaatttcggtggttctttgccacgagataactaacaacctccttgaaaagaattttgcgtggtcaagctctatgttgttaaaatgcattatatggattctactaaatattaattgtgttttaaacaccttttagacttttatttttaaattcagtatgccaatgccatcctcagaatcttatgcactcttgggttcaacttcttggttttaatagggagtgaggcagggatgaatggatggaaagatgttgcgttgcaaagtttctttggaatccttctacacattttttgtgaatgtggccacctcatcactggttacttaaatataatactcatagaaatttgcttttattttttaaaataccagttgctattgagaacttatattccctggcacctcttttccttaatgtttaataactacaagtgctaaagttacatatttgtgtgttttgctattttaaaaaatgaactagtaaccagaagctgagacaggctagaaacaactgtactgccattcaactgtgtagtcagtcttccacatggcatggttcggttccatccctgtttcttcatagcttcagccatgttttagtatgtatctccgtaagtactcactcatgagaaaatatagttcggtttgtcacaagattgtttagcatgtgttatttcagcctttttaaaaactgtatatccaattacaatgtttccctatattatgcaaagagaaactttcagatgtcatagattttattttgtcaagaacaaactggattttctttaatatttgctcaacagagacactcattttgtttattacttgcttagtttttaaatgtcttgctaaatataatggctccctactctcgttagcttctgtctcggagcctattttataatcacattgatgttcacgtatgtaccgacatcgtcagtgttgccgttttctcattttcctcatgtttagattattacttctatctttaattaatagtttctttgaaggattatttttaagtcacctatctgttttaatagggttaatttaattaaaatgagataagttattcattattcttttagccaagcacagatgaccttctgctgaaaggtgactgacaagagagggctccactctccagtggtggttgtgggactccctgttcccttgggataacccctttgcaatacatgacatatgaccatccaatatacaggctagggtatgagatggtacacatatcattctgtacattaagtctttgtggaggtcaattcttttcatattttttgcataatacctgtgtaagtcctaatattacccccataaaccagtgaaccatttttcacaaatcctggtttatatacggcacctcagaaaagcctagttcaaatgctggctctgaatcttactatatacataatacagggcaaggttcttcaccttagtgtgacttgatttcatcttaggtaaaatggggataatgcattagcatcattttatgtggacacattaaaataatgccttatgaagtacctttagggtacatgctgaagacagtaggcacgcaatgtacactggcttttgttattttggttgtgatttaagcatgcactccagtaaacatatacatattgtgtttgtgtctatgtctgcatgtatgtgtatatttacagagaaacatgcatttggacattctttcattgtaggttgggattgggatttcctataattcaatgcataaatcagccaattacccatctatctggtgatctctcttcttggtttatttggctttgccttgattcgtggagcatagaacaagacacataaaataaaatgataacaaaatagaaatagaaaatcaaagtttatagtctgggcacagtgactcacgcctgtaatcccaacactttggtaggacgaggtaggcagatcacttgaggctaggcatgagaccagccaggccaacatgatgaaaccctgtctctactaaaaatacaaaaattagctaggtgtggtggcacatgcctataatcccagctactggggaggctgagacaggagaatcgcttgaacccaggtgatggaagttgcagtgagccacgatcacaccactgcactccagactgagtgacagagcgagactccatctcaaaaaaaaaaaaaaaaaaaaaagaaaagaaaagaaaaagagaaaaaaaagaaaagaaaggaaaggaaagaataggatcaaagcttatcaaactataaatcaaaatggtagattatcaggaacaagagctgatggaacccatattactcccagggcacagctttcttctgtggtggagctaaaggttatatcaatgtctatgaatcttataaataacatatgttggctaggcgcagtggctcatgcctataatcccagcactttgggaggccaaggtgggcgaatcacctgaggtcagcagttcgagaccagcctggccaacgtggtgaaaccccgtgtccagtgaaaatacaaaaattagccaggcgtggtggcaggtgcctgtagtcccagctactcgggaggctgaggcaggagaatcacttgaaccagagaggtggaggttgcagtgagccgagatcattgcactccagcctgggcgacagagcaagactcagtctcaaaaaataaataaataaataacatatattaataatacgtatggaaaacagaaatgacagttaattctgtaaagaaacaaataatgtattgaaagcacagctttatggaagctggactgctacgggaaggcttcagagtccatgcctgatcctgtctgtggtcagatgcagcacagcccctgacaacacgatgggcactttgggcacgttgctgatcgtgcactcctggtgctgtggaatgtttctctggaggttcttggctgacctcctcagcaattctaattgtataaaatggctggacctccagagtcagaccccagtgttgtctttgacgtatggaatcttgggagtggcccttgctgatttctctgaagagtggtccattaacctctccaccatcccagcttaaaatgcctgtgcgaattgttttgagcccccgtggggactactggctatttttggattgtaattcctccaagaaaattaaagcaagatttatttatgcaatcaaaggacattttatccctaaagccatcggttcctttcaatgataaagtttctatctaatcataaaagatggattaatctggtactggaatccatagctccaatccattccttgattttcctgaacttaggagtgtgaatgaagctgcaaatggggtagatttattggtaaatatgttctttgaatttgtttggtggttgtatttctatcttggtgtggtccaaaggactttgatcaccacaaattggaatgactcctcctgctggggtggcatagtcaccactcaacctgtggaagaagcaaatgtcccatgcatggcactgttccaggatcttctgtgcttttccataaatgcagctatagccctcacctcctctccaccctgcccctagcccatacaaatggtcctttcccccaaattcattatttagtgtctccttagcctaggaaatcatgtaatagaatttgaatacagatgttataagaccataataataatttttaaacccctgggactgttaactagatatacatacatatatatacacatatatatgtatacatatatatacatatatacgtatacatatacatatatacacatatatacatatatacgtatacatatacatatatacacatatatacatatatacatatatcatatatacatatacatatatacatatatacatatacatatatatctatatatacatatatagatatatatgtatataaaatatctcttatatattgtgtatatatatattatatatatattctcatatatataatatatatatatgagaatatccgtagagttagcaaaccattttccaaattacactggtctcatgcaccaaacgtcttaacagtgtctgtatatattcatttctagataaatatctaatacctcttgctatcaagatgtgtgtaataagatgttcttttctgtttccatcgtctagttttttgtgtctctttcaaacttcttaagctaaacaccttatacattcttcaaggtatggccaggcaacaatgaaccaatctttttcattgacaaaattatgatggtgaataattaaaactggcttaaaataccatccaggtagaaaccctgctctcctagtgtgaactcattctttgaccagatattgtgttatactttctaagggtaggatatgaaattttatttccctaaaattcaaaaacgagtaatgattaatgagcgcttactataaatatggtgccattcttagtgcttactcataaacctccattgaatctccagaaaaccctattaggatggatgttgttattcttctcatttttataaatgaaggaatggaacctcagaagttcattaaattgcacatgctggtgtacaaagccagagagttatggctctagcgcctgcgttcctaatcactgtgtgaatagataagcctgcctcaacagttaaactatcatacctttgaaagttctatgggaagaaggtcaagaaaagaacatttctaatttattagcactatttcatatttaaaacaactataaggtagaaattattattcttatttgtacagaggaagaagtaaaggctcgatatcattaagcaaccaggatcacagagttaggaggaggaaagctgagagtttaacccagatacgattggctccagagctccgtactcctgcttctctgctgccctgcctctccctaggctgtggtcttcaaccccagatatgcttttcagttacatggaagtttttaaagatcccaatgccaaggccatgcctcagaccaattaaatggtaaccttttaggttaggcatcatggtttgttaaagttcccacgtttaaatatttaagaactactctggggtgggcagtctgtaagcaagaaggcattttcaatgggagtctgtagcattcataaatgcaaaaatactccctctgcccatgtctatgtaatctctagtgatttgacttgctagctagcatgagtttttcagtacattttgatgaagttgaaaataagattgacaaacatagccaaaacagcctatttccagaacctctgacaaactcttacctaaaggtatgggctttggtaaaatctttttaattatcctgaaaggtttgctgccagctattactagtagtctatgctcggaattgttttgaaatgatgaagcaccctctgcatctccttttaaaactgagtagcactcacccaacttggtggagcttcatgtatttaggttgatttgttgagagtgctactgtagaatgatggctactatgcaaaatgcacttacttcttgtcctttataagccctggtagcacagatttttctgttgctctaggggctgaggaagtagtttcccaccttccctatgaaatgccatcagcctcaccattagtaccattcaagtccatcggttatgtttttgccttttgttttttgtttttactgttgtactcccaggtcacttttcatgtaattctagttttcacctaacttagaatgcaattccctttccatctattatctcagctcaccaactatagtccgttatgcttcttggttgttgtcagtcatagtgcagcatgagacagacagttctgatcctgtttagatacagagatattctcgatgcctagggagtcaagaaacttgggttgcagacacctacttagggagcaaaacataaaatctaatatgaaggaatattttttggttttcgaacattgctctcctaaatacaaataatcatgttaatataactcctaaaacacattggaaaactaggtaaatatattaaaagatgcgttacaaaagaatatatgcaaatggccaacacgcatattaaaaattcaacataattagttgctacggaattgctaacttaggctgggtgccctggcttaagcctgtaatcctagcactttgggagggctacgtgaatcacttaagcctaggaatttgaggctagcctggtgcaacacagggagaccccttttctacaaaaaatttaaaaattaggtcagtgtgttggggcatatctacagtctcagctacttgggaagctgaggtgggaggattgcttgagcttgggaggctgaggttgcagtgagccatgattgtgccatttcactccagcctgagtgactgagtgagaccctgtcttaaaaaaaaaagaattgctaacttaaagcataaaatataaaatgatggacacacattcaaaagaggtaagaatataaattcatatatttccataaagcaatttggcaatccgtattataagctttaaaatgttaaactacccagagcctatccacatgcaatctccatgtgtctgcctgtctgtttgcctgcctcgctgaaacagacagtccattctctttctagctcctggaccttgtataattataattgccactgtgaaaatggtggcaccaggattgaagccacattgaaactaactcctgatgtgcttgtagtccaagttcaaagttccttctgcctccaaattgattgaaattaaatcaaacttcctaagcttcggagtttaaactccttcctgttttatttttgggaatgatttagcaattttgacagttttcctttgatttggatgcatgaggcggtgtaaagtcagggtaatagtctaacttctctaaccaaagcaacactggaatcgcagtggctgaacagggtcaagattgatttcccttcatgtcatggtccagtgtgggttggccaaggggcctctgctccactccgttatccagggacccagacccgaatcctgccatcttctggttctgtcacccacagcagcccctgtgtctcagctcgatcctcttcatggggccagctggcggaggaagagcaagcagcacaccacactggagactcaggtttagatcccaggcctgcaaatggagcatgtcacttatttccacgttccttgtaccagaactcagccacatggccctgcctagccacgccgtgtgtgtgtgtgtgtgtgtgtgtgtgtgtgtgtgtgtgtgtgtgtgtgtgctcagggagtagaaaggatgggggaggaaacaggatctggccctgtgccaaggagaaaaagcaaacgggctgtcaacacacagcagtctctaacgctggtggagaggagggcgaaacataacatttattgaatggcttctcagctttcctctccctgcttgcaacaggaacaacactcaatcaagtgacttcattataaggagtgactggtacacggacaaggaccagaaaaagagctgtaggacaaaattgatggtgttgcagagctcattctagctggatcaacagggcactgtctgttcggtcatctttttggccttggaaatgctgcctttatagaattctacttcagagaagacaacagaattttatgtttgcctgatgcatgcatgtgtctggattacagatgaagtgattccgtccgtccgtttgaaacagctccagcagcatcactcccttcctctctgggaggaacgccaagacaactttgcccagttcttactttccttgaatttcgactctccaaactgacttctttccccttcttcttcttctttttctgcatcttattaagtgtttaaagataaaataacatttgagaaagcaaaaataaggtgggaatgttctgaatagcagagagaataaaaataattttttccacccatttctgccaaaaactcttaaaaagcacattctacctttgttttatgagggcaaacacaaacaatttttagctataaatttattacttatgcaaagaaatgtggaaagatgtctgtcagtacttaaggtagctacaaaagttgctcaaaacagctgtctttaggatttcttcttctttttagtgtgtgtttgtgtagtgtgtatgtgcagatagataaatggatagatgaatggatggatgggttgattgattgataatagatagatagatgatagatagataaacagatagtagaatggcctgaattctttccccctgcctcgtcagcagttggcacaatttttgaatgtatgcattctgcattgtcatcagagtgggcacctcctgaggctgggaggattctaacgtagtcaataaaatactaattgacctttaaatatatcattttaaatggtttgatgtattcttaaatttattatgagccatattatgcatacacaagagtgcttatagcacttgtatagttatagatttgcatagttatagaaaacctctgtaaccaccacctggatcacacaatgtgagccagcagcccagaagcctccgtgtgatctcctccatagccgcttcctctgcctgtctagatataactactatctgatcttaataattatcattccctgcttttctttgtagcactaccacctatatatacaaccctaaataatgcaagtttttgcctgcttttaactttcaaactagtagtgcttgaaaggttttgccaaatgtccctctccagaaccatctaaattccagtaatactcctagtcctgaacctctgaatatatgtgcaaattattccattcaaggttttttcattcttatttttgttatatatattttgttaattacactagataatggctgtcttcctcattgggttgagggatgtgtgttattgggtgtgaaaatagtttattatctttttcatcagataaattttaagcttacaatcagagatttaaaagcaaactggactagtgactgggaagaattgcttggatgacaagatcagtttattgcactttggtgagagtgcgtcttatatttgtttgatgaattgtaaaaagcagagttcattgcctgtgttaaatatcctccatcatctgtcagtgttgtatccaacgtcctcaactgcttcagatttggtgttttgggtggttccacctcagcgagccccacggcctatatcagaacatgtcgattgctgagaatcacctaaacgaagctgacttacagcagccagagagccgctcggcaatatgcaacattagagacacattgagcaacacagtctgtgatctctgcagtgtcacaggaaatgagatgcctgctatatcttcctgagctatggatttttgcaactagtcagaactttattccagaagaaagcagggccatgtgggtcaagaacaatttaagtgtatctgaggctggaatccctttggattttaaaaatattattcctggtgcagacaggttcaaaaaaaaatactgttctagctgtagattccgttccttcatcactaccgccatcatcatcacccacaggcgtctattcagagcctagtggtgctgcattcaatactgtatgttgctttggccacttacatacaaacacacacacacatacacacacacattcggtaactgtgataaaactttattcttcctccctgtgcgatgtcttgtgttactgagacttcatgcatagaaattgctatgagctagtgacctcctactatctttgaaataattaataatgtgcttagaggggttgatttacatatttatgagggtttatactgtttggttccaaagcaggagactgagagaatttcatgttttcaatgcataccaagttagcaagaggaggagtggcttaatattctaatgtcaagatgaacataaatatctaatacccaaaccaagtaattgtattatttatttgcagtaaagtctgaatgccctccaggtgatctcacatgttccatcactgattctactcgagtgtttggaaaaaataatatttcttatattttctgctttttgaaccattactagacatcaccagtcttggaattatatatttatagaggaaaacactgtacaaaaggcagtggtgaaacacaaggaaggaggaataagaacagcattcaaagaagtaatcttatttacttcctcagcatcactcctgatccctcccccaagctgctacctgtgacagctctttcttgtggctcaagcacagcagtgcttttattttattttattttattttattttattttttttttttttttgaggtggagtcttgttctgtcgcccaagctggagcgcagtggcgcgatctcggctcactgcaagctctgcctcccaatttcacaccattctcctgcctcagcctcctgagtagctgggaccacaggtgcccgccatgatgccaggctaattttttatatttttagtagagacagggtttcaccgtgttagccaggatggtctcgatctcctgacctcgtaatccgcccacctcggcctcccaaagtgctgggattacaggcatgagccactgcgcccggccatcaactactgtctcagtttgcccaggcttctattacaaaataccgcagcccgggtggcttaaacggcaggaattaattttcccacagttctggaggctggaagtctgagatgaaggtgtcagcagggttgatttctcctgaagcctctctccttggctggtagatatcgtcctgcctgtgtcctcctgtggtctattttccctctgtgcctctgtcctcatctcctcgtcttctaaggacaccagtcagattgggtgaagatctacaccaatagcctcatgttacctctttaaaggccctgttgccggccaggcacagtgactcccgcctgtaatgccaccattttgggaggctgaggcgggtggatctcctgaggtcaggagttcaagaccagactgaccaacatggtgaaatcccgtctttactaaaaatacaaaaattagttgggcgtggtggtgcacgcctgtaatcccagctactcgggaggctgaggcaggagaatcacttgcacctgggaagcggaggttacagtgagctgagacggcaccattgcactccagcctgggtgacagaatgaaactctgtctcataaatgaataaataaataaataaataaataaaggctctattgccaaatagagtcacatcctgaggaactggggttagaacttcaatgtatgaatttgggggtacacattttatcctataacaatcagtttctcaattctgaaatagtttttaaatactcagcacccccaagttcagaaaaggcctattgaacgtgagccctctgtatgtaagttctgctccctgcggttaagctactgggtgttcctaagacacgccttgtcctccagccttcccaaaagcccttccccatgctccatgtgggctggtttcctgagcttcaacgcagtgtccctggggaatgcagggctctttctgccaattttctgatttgaaaatctagactcactagcagacgtttcaggatggatcctcctaactttcctgtgctttgtaaatgtaaagattcaagcatcttcttgggggtgcaggtggctaggacagcatttgtggtcatgtctcagtccctggctctcccaggatggattgtcaggacctgaggcgtccagttattgtggactaaactgccaacagttacagtaaagccaacaatgtaatcagtggctcacacacaaccgcagcataattcttgcctggggtgggcgtttcaggtgggtggtggttatcttctgaggggcatttgtatcttttgcctttattatcccactgggcctggtccatatctccatggtcaagcttaatccccacatccaagatccagctggcagaggggaatgaaattataaactaggcatgcatctttcatataatcccagcccagaaatagcacacacccctaagatccttaagctaggccttagtcatttggctatatataccttcgagggagtctcagtaatggacccttgagtagaggcctaggaaccagagaaaagaggaatttaggcggacatctggcagcctctgtcaaaaagatattcctctaggggtactgggagcccagcttccaaggagtaggcttggttatgttcatgcttcaggaaccttgggcaaagtgaggaccctgtactcagatggtgccaattcattgaccagcccactcaactggatgtcgagctgatttcctcgttttaaaatgaagagaattctgaactcagaggtcataaatcagatggtatataaaaatgactggcacagtacctggtacccagtcaccaccaaacctatgcaccagttttagaatgcattctagaaacgcgtgactcacacgggaaacctgaagctgcgatgtaggtttaattgaagttgtatagttgaaaagtaaaaatcttattttctttttgacattttctacattaatactttgatataggaataattaattcctttgaatcagggattaacattataagaaatgtaaaacgttccataaatacgtgcttgtgaaaacaaataacttggaaagttattgatagttctttataaaattcttatattagatctattgcacaaaaccagattttctaaactaatctttttcagaaagaggtatatgtaggagtataaatagcggcattactgaggctaccactctgtattatttttctcttctcactgatagcattggtaggctgctttaactgggttgttagtataacttctaagtcctttccagaaaattttgtattctgaataggctgcagatgagtaatgaataaaactcatttatgtgcttgtggactgaaatcaagtatgatattaaacagatatgtagtttgaaattggggtcacggtattctaatggaattgggagctacactaaaagaagtggactccagactatggttcattgggctacaggaagaaaactttataatttctgtgtttgatttactttttatatcctcctttaaattttttttgtttttctatcttttgttttccatgtgtttaaatgtatataaaatagaagcagtatttgcattgaatcagtattggtattcataatcaattctttatttttactaataggggttttccaccaaaattttggagagcactgatctaggccagtggatttcaaagttacgttgctgctacctatggaaagagatacattttacatcaagagctataaacatataaaatgtacacacgcatgtaattgaaaaccctttcacaaaataatactttcctactatatgtgatgcactaatattttcagttttaatctatttcagatgcatttgagccatcccaaacacttaaaaatcaaccctgtcttgaaggactttcagaaggaataccctaacttcccttgggagcccccttcgtgtttagtcatttcaaatatcagaacctcttgtttctgacataactcatgtcttacgctgcagaaaaaaaaaaaacttaattagactagatttgaacaaagtagaaaaaatgaagtcatccattcatttttctaaaccagtcagttttaaaattcaggaaaacataaatttttgatacatcttaacagaaagcacatttcagatacacatttcattttcaggaatgccatcactaaagccagataacatggatactctagggataccacagtatccatgttatcccagcctagtcacacctgagtgaggggctgctacctcccctgatgcagtgtccggaagacccctacctccctgcactcccatccccacacccccagccccccacccccagccaggacaggacaactttattattagaacagtaacctttaaggtaacatagttacaaatacctaaacagcctcagttgagagtgacttctaactgtttacttctccaccgtgttataatttctaagcaaatttcctgtgtgtctttagatgggcatcagaagtacaatagttaatgcttgcagctttgcttcggagcgttcttttttctgccatgctgattggtttttgtttttttttttttgagaaggagttttgctctgtcgcccaggcgggagtgcagtggcctgatcttggctcactgcaagctccgcctcccgggctcacgccattctcctgcttcagcctcctgagtagctgggactacaggcgcccgccaccacacccgactaattttgtttttgtatttttagtagagatggcgtttcaccgtgttagccaggatggtctcgatctcctgacctagtgatccgcccgcctcagcctcccaaagtgctgggattacaggcatgagccaccgtgcccggcccatgctgattgttgtaagggaaatgctgagtttgtcttggaggttgtttttggacctacagcaagatgcactcattagctaacttgttcttcaaattagatcactatggtagaaatagtactgaactataagtcgtgaggctaatcctgactctaccccaacttaacctggttattttggtcacgttactttctagctactggatactagggcaggccttttgcgtacattaccatatataagcctcacagtgattctctgtggttgatactaataatctccttctgcagatgaggaaactaaggctctcagaagctaaatgtaaacataggtctgcctgactgtaaagttcattttccctctccaccttttattcacaaaacctctttcatgtctaggacttcttccacctcaaagatgttatgatccttgtctgctggcccctaaaccaagtcttactatttactgaatccatgaaattggtcagactcagcatgaaaaaatacaatcaaatcagtacgtggagacagtgcctcctaatggctctgcaagacacactagcatctcagcctctctgcagtacctttagattgatgtttatcaaactgtgttctgtggaaccgtggggaggggttgtccataaagcatatcaaggattattttacaacaaaaaaggtgggaggatcacaaggtcaagaaatcgagaccatcctggccaacatggtgaaaccccgtctctactgaaaatacagaaaaattagctgggcatggtggcgtgcacctgtagtcccagctactcaggaggctgaggcagaagaattacttgaacccgggaggtggaggttgcagtgagccaagattgagccactgcactccagcctggtgacagatcgagactctgtctaaaaaaaaaaaaatgtggtcaatgacagcaggcataagttttttctgttttagtaattgagacttccatatcaatactttatcaagggaacaacaggcaaaaataggggcttctgtagtcttcaagtcatagcagaaattttgattaaaatggttttggtttcttaatactatatatttttgtagaataaaagaactgtacatgttgtattgtgagttaaaataacctaactgcaaaatgacaaagaccaaattttaattgatctctgttattaacatagagggaaactagtttattaatattaaaatactgtgttatggtgtagaaaagtaggacctaaaataatagagcatagaagtaaaagtatttgggacactttgccttcaaaaacaattcaaagcattttgttttattttgtttttgatttgttactccctattttaatttgaacatgctcgtttcagttagagactgtttactttctcttcatttcaacaaaatcagtgatcttggtgagtttttattgttcatatataactaagcaagtagtaaaagatgttggtttcagagggagtaagacctcttgttggatgaaatgccaccatcatcatcacaatttatttatctaatatctcttgttggatgaaataccaccaccatcatcacactttatttgcctaatataccactttagaaggtactgtttcaagaattgggtgttgttctcggttgtacacagcttctgtagctatcatcatatcaatagaaggagtaattacctataaagtatgcttaactgtacactcatgctaagtatagcatactgggtataaatcaacaacagctaacttcaaactttattttccaaagcaaacgtctaggctgtaattttgccattcttccttctgatccaaaaataaaaataaatcaagctgtaaagctgataatgagatttgcaaccagctaagatataatctaaatcataaggaggtttaaaagtcctattgttcattttccactatgcgaatgatttagaaaacccgggttcagagacaaggaagaccactttgccatttaaataagggactggcacgggtagcttctgtgtttcatgatccacgtccccaagtaatatatgatgtgtttataggaatgttaaaggaacactgaagattatggaagcgtttttggggataataacacttaacaggaatatactgtttaccagtgagactgaaatgaggctgaagtaagtaataagcatttcagaaaattacccaattacatatttaaccactccaaggcattttacaaaattgcttttaattgtgaattgtgtgtttgcaaaggaacctggtgtggtagtaggaggcatatttgtcagagctcagcaatggaatcttttttttaaaggagtttgaatacaagagaaaacatttgcagttgcttttctgatgccaataaaatatgtgtttaagactgcttggcatactattctagaaaagactacagagctattttgatgcctgagggatttaataccaagtactttgaattgaaagcatttagctattgttttaatacactttccttctgagactacagctacattgtagggagatagatttctaaattgcaaatattaattattcatattacagaaaacaccctaataagtttcctgtttttatttcacatagaaatgcacaattaaattactgaattcttaaaacttgtatcaatagcttaaaataattttcccttaacttggaagtagagcttaattttcattaaaaatggtgcatctggtcacattttgagaaatatatggaactgtggcatcctgttgaatgatataatttgtatcctctaagtaaaaacaaagacggttgcataggcctctacaatttataaagtgtgtccttaaaatgtcagataaagcaaatccaagcatcctgtccattttataggcagtatctactacactgcaggctctgcgtcacagggagaagcaacggtttgcagaatagataagcttcttcccctcaaggagcttgcaattcagtgggggtttcagatatttatgaaaaaccatgcagctatataattacagattagataagagatggaagaaacggaggaagtgaggcaggacaggggaagaaaggaacaacttgaggtaaaaccttgagacaggagagagcaaagcatgtctgtagcatggagagaccagagtggctggaggagagtgaaagagaccagcaaatgggcagggcccagcaagcccaccctggaggatgcagtcctggaagtcagatgctggaagcttcatataagagaagtggcatgatcagatctgcatttttaaaagaatactcctgctggagggaggaaaatggttgcaaaggggcaagaggagaggtgaaagaccaaattcagtgggactcgtgatgggcctcgtgtggaggaagggcaggcaggcgttgaaggtaatgcttaggtttctcgattcagctcaggacgggtaggtcttcagcttgtagctcacaaatgctcgtgagtggtatcatggaatccatgacaaaaatttaactttcaatcaatttaatatgggtgatattgcactttgcacgttgtgggggggaaaggggctggtgagtgtgctgttgaagttctgtaaatgacccttgctgaatgtgcctcagccttaaactctcaactcacagcaacgggcagtgcaagaaacagagacagaaacagatgcacaatctcctcttacaacgtggtcgctgaggaaatcacccactaacactgctccgctcttcgtcaactcctgcaagatgttcccctctgcactaaggctcatctggttgacaggaacagaaccaactaaagctaatataagaagagaggagggggttactatcaaggatgggggtgtctcctgtttcccagggacaggggtgggtctcgggggcaacagaaccattggtccaaagaccccttctttgtctccatgcatctacatcacctgtcaatctgcctgcttctttcagcctttgcttctccaattccggcaggaacgtgccaactcacggctcacaagcttacagagagtcgcacgatttgggcaaatgatttgtgcgattcaaagacatttgcgtgattcaaacttcagtccaggaaaaatattagttctcctgaatgacacataagttttctatgctataggtaatacaacggttacagagtacaatgttgactctccttaggccactaggaaggtcaggacttatcttaagaaactgtcatctattctgggttttatttctatatgctctctttatcttttgtcctcagtagtctctcagtatttcatgttctctccattttttgtctacttaaatgttattggtatacatttgtataattgtctcagatcctttctagaatgttacaggaaaggaaagataattgaaaacttcaacttgaaaatggcaatagaatttcttggtgccagtatatttgagagcaatggtggcctagaatgtagcaattatgcatcaagaatataacagtataaaacttattatgtgtagaattttattccttttccttaggcatttcatagctctatagtacactgaatgcattgtgtgccaaacttcacatgtggccaccggtttttgtagttatttaaatctaaatttatatagattatatgaaattaaatttcagtttctcatgattacaaaacaatgtaaatacgttcagtggatacaatattagttcaggcatagagtatttccaccgtcatagaaatgtccattgcacagcctgacatcaagtagtctttaatttgttcattaatagcttgaaagtaacttctgcattaaaagaccctgacttaacccttctgggtctttttcaatcacgtttctagtgcatctgtctttttggtttgctttctgttctaacttggtcactattagcattcagactttattctactcctgaatctacaagaacctcaaaattcctcattgtcaggttctcccactgctgtccattcgctcactgtcttatgctaattgagattccatttttaccacaacagtgttctggtccagcctactgtggcttcgtattttttcttactgttgcctcacatcagcctagttttctttcttggctacctaaattcctctcattaactcccagagcacgacttcatgtgtgcctgttgttttttcagccctcacccgtaggaattctgtcccgtctatgccaactggagaatgcctgaactgcctgcccactctcgctctgtagctccagatatgtcctgtcctccaccaacccagacctccctaggccaaatgtcctgtcctccaaggtgctcatgtcctgttccattctggaatcactacctaattaccagatacaaattgttcttgataaatccacttaaattataaccattttgggaaaaaccttcaaatcttgttcttccttgggattccgtttttcccagtgccaacctcctcaggaaatgtcacttcatgagtgtgtacttgatagaattcctaaggtgatacaagccttggactgaagttggtacctctgttttctgattatagctctgcttctagctctctatgtatgattggcctttcctttaacatttcagaatggttttcttacttggaagccaggagattgggctggtcagatgctgatgcttacagttctgtatttttataaagtcagtctttaatctatttcttgggtcccattatatatcttgatattatcagatactacctatttctgactgtaacttgtgcatctggtaaatctgatgattgtcatttgtcatgtgagcatttgcaaccattggccgaggtctcctgttacattgtaccatgtggcacaaaggcatacatgcacatattgatccatgcatttgtctatccatccattcatccatcatccatccatccatccactgcacaccgtagctcggccacagtgctagtcatagaaatacaaagcaaaaagacgtactttttactttcaaagagcagcccgtcttatctggagaaagacacaaaaatatgacaataaagaattgatttattcaaggcaagtacctactatgttttgttgcaacacaatggttcaccatgtcacttattaactggccataataccttaggactgggacattaattttcagtaattctctagaacatctgtttaaaccataaaatttctctgggtaggatttggcctctattttacggcagtctgccattctgaagtgattgctgaatactcaaagcatggcatagtgaaaaacactctattgattgtggccagcgaagttgcattgtattgaaatatgtgctgcctcactgaagtcttgactcattcatgccattgataacagtttagatatgtgcgggtgtaggctgaaaacgcacaaatattagggaacatcagcaacacttgattatttatgctcttagaggacttatgctcatgattcttttgcattgagctttaattatgcggaactgaaggttctgatgttgcaggacttttccttagttcagccatggacggggttctgtgtcccacgaccacaaaaattcaggcttgcaagacaatttaaagggtgggtaagacagggttttattaggtgaaaaggaagaaaagggggaaacagggactctcgctaggccagagtccctgctagacggcttccggcgctcagcctgaatctcgggttccacacaggaggaggaggggccaggctcctccccactgcagagggcaggctggttggagtttctccagggaccccctcccacctggctgtcccactagaactgaaattgaggcttgaaaaaaagggtcttttccatctttaaaggtgttgttttacttatatgtaatacatcattttcattaaaataaaaatgtaaaagtccaattccaggacgcagatacccgtgtgggtgtcgttgagttgcgctgtggctgtggtgggcagttagaaaattgatgtgactcagtctgacatcgtggcattgttttcaaattcagctcagtcttacaatgttcccagttaaagtgtgagtgacactaactaattaaattgaggaaaagggtattcataaagtggacgatataaatagaaaataaagttagcaattgacattgtgaccaccggattttttttttttttaagaacgagctgtgtggtaaaagggtatatttagagacaagaaagataaaaggccatttgattgagaagtattatttgtggttcaatcggttgcatttaggctgctatgcctcgttcactgaaagtataaacatccttcagttgtatcacaaagcttcttttacctcagtgagctatcagtatgtcagctcattggtcagacttcagaaaactgaacccagttttatgttcaggtgtacatatttctaaatctggggaaccctaaaacccacttgaaacaccagatatatactctgcaatgtggtgaccattggctgtacaacctgtgacagaaataaggttgtggaagccagacaatgggaaaactgcgtggaaggatctagcaattaagtgaaatgtatgtgagtcagtgaatagaaaaaggtaattgaaatgtaatctatgttagtgacattgacagtatatagaataaaaaagaagttggaaatggctgccactctgataggtgccgaaaatctgtcatgccattcagctttattggaatgattaacatcttagaaatactagaaatactgaagacacaaagaatcctggtttttacaagtcaaaatgggacataattgttccattagtctttcatttttaatggctttttggtactttctgaagcattcagaaaaacacctttaaatttacagtgactggccaacctttccaatccaatgcattctaccaactgacctaggaagcccctagatcctagttactgagggggaagatgcaggcgtgccatgaactcatacattaaaatgcttgccatcctgattacacaacttgaaggaattttgatgtctttgaaatgagagattatctcttgttttaattttgttttttttttttttaaacagtctcactctgtcgccaggctggaatgcagtggtgcaatctcagctcactgcaacctctgcctctggagttcaagctattctcctgcctcagcctcctgagtagctgggactacaggtgcccaccaccacgcctggctaatttgtgtatttttagtagagacggggtttcaccatcttggccaggctggtcttgaactcctggcctcgtgatccacctgcctcggcctcccaaagtgctaggattacaggcatgagccactgcgcccggcctgaaatgagagattttcaaaacaaaagaggttaagatgtgtttgtgtggtataggacggaagagacaggttgtatactcagacagacctgagactgaatttcaagtctcttcagctttgtgacttcaggccagtccttttatttctctgagctttgacttcctgatctatcatctttaagtgggcctgtgttaattaaatggctaatgttggtttatattgtttttaacagctttattgacatacaagaggcccatatttaaaatgtaccatttgataagttttacacacgtatatgccagtaaaacaatcaatgtaaggaacatagccattgacccctcccatgtgtccctgccaagcaattatttatttgtttacattttctagaattgtatataaatgctaccgtagagtatgtactctctttttgtaggatttctttgatacagcaaaattattttgaaatttatcattgttgtgtataagaaaagtttactcctttctactgctgaattgtgtatattttatgtatacaaccacaatttgcttatcctttccactgctgatgaatgctgggcttgtttccagttgccaggcattaccaacaagcatctatgaaattttatgcaagtctttgtacatgtagatatgtttctttttatcttgtgtaaatacctagaagtggggtgactaaatcatattttagagtttctttttaaggaactgccaaactactttccgtggtggttgtaccatttccattttacatgcccacccagaatgtacgagagttctagttgctccagttcctactcaacacttggtatcatcaatcttttaagttttcacattccattaagtgtgtagtggtgtctcactatggaattatgttgcatttcctaatgactaatgatgttaaatatatatatatatatttaactgtatatatatatacatatatatacagagagagagatgtgtgtgtgtgtgtgtgtgtgtgtgtgtgtgtgtatatatatatacacagagagagagagagagagagagagagagagagagagagatggagttttgctctattgcccaggctggagtgcaatggtgcgatctcagcaaactgcaacctctgcatcccgggttcaagcgattctcttgcctcagccccccgagtagctgggattacaggcacacgccaccatgcccagctaatttttgtatttttagtagagatgggattttgccatgttggtcaggctggtcttgaacacctgacctcaggtgatccacccacctcagcctcccaaagtgctgggattacaggcataagccactgcgcctggcctgactatctttttatgtgtttatttgccattctcttactttctttggtgaagtgcctgttaaaatcttttgcacatattttattattatttttatggtgacacggagtctctgtcgttcaggctggagtgcagtggttgctcatattttaaaatatgagttgcattcttactataaaaatgtaagaattctttatatattctacatgcaagtattttatcagatgtatgatttgcaaatgttttctctctgtgtgtggcttattatttcattttcttaacagtgtctttcaaagagcagaagtttttaatttcagttaaatccaatttgccagcttgttcttttatggattgtgctttatgtagcatacctaagaaatctttgcctaacaaaatgtcatgaaggttttcccctatgttttcttctagaagctttatgttttatattaagatatctgatctattttgaattatcttttgtgtatgatacaagttaggaatcaaagtttcttttatattattggtatttatttttttcaaacagcatccactgaagagagtatccttttgctactgaactgatcttgcacctttgttgaaagtcagttggccatgtactggagggtctatttctgttctctgcgctctgtgtcactgatctatctgggtatctgtatgccaatagcgtactgtcttgatttctgtagatttacatttagtgttgaaatcatgaagcatttatcctttaactttgttcttccttttcaaagttatcttagctattctaggttcatgttattatcttatgactcagagtttgaagtgaggttgctgggacttgcctccatatctttcaacccctaacccagtgggtatttcactagcccacacaggccatgaatctctatttaaaaaaaagaaagacataaagacagcaagaaagaaaaaagaggaggtagggggagagagagagagaaggaaagaagaaaaggaaagaaaaatcttttggtcttgtcatgtgataaacagttctaaagaaagaataatttgggaaacagcaataaaaattaaaagctgagagaaagtgttttttttttttttttttttttttttttcgagacaaggtttcactctgtcaccctggctggagtgcagtggtgtgatctcagctcactgcagcctccacctcccaggttcaagcgattctccctcctcagccttccaaatagctgggattacgggtgtgcacgaccatgcctggctgatttttgtactcgtagcagagacagggtttcaccgttttggccacggtgatctcgaactcctgacatcaagtaatctgcctgccttggcctcccaaagtgctggagttacaggcatgagccaccgcgtctggccgagaaagtgttcttaaatacaatgtttagttatagtaattttcatgaactatgtgttctaagtagaagctactagcttttttttgctgctttgcctttaatcggactcattattttttattactttgaatccctcattgatcaatttcaacccagctgattgctaattgtcaattgctcatgagtcctttttcaaggctcacattttaatatccttggcgttttttccaacacctattgcccactgtctattggcaacagagggcagtagccacttgtgctggcctgtaggggagagtctgtttcccactcacctgcttgataagacattcttgatgatctggctgacatgaagacagccagccaacagcacacgtcaaccctgattaacagaatgtgaaatgaggaagttctggatcctcaaagtattgttttacttccagtgtcttcacgttgaattatccacattgaattacggatagtgtttgtctactatccattttgcactgtttcataatgaaagtaatgttattttcatcattatcatcatcataatttcaattctgcttgccgtagtcgaggcactgttttaagtacatgtttttccccccaacatatgaaagtaccagcaataacctactactgtctgctaggaatgcaagatatgtatttttcacataataggaatatatatccataacccttcgatattactgagtcccttttgtgttaacagttatcaagtactttccaacatgacaatttcagaactatctgggagtgatgatgtttactgtcatctgagaggtcaccaagcagagttatggagatagtgtagggaggctgctcccactgtcacgtgggtgcagtatgttgggagagtgcgttgtctgtgagaatcattgcagagagtatggatgataaaaagaatcaaaacgctttctgtcatgcacctcccctactggcaagaagctgggcttgtctgtggctgcatcctcagcccctgagaaaactgtcacacgctatgggtatgcaatgttatcaatgaacaaaggaataaaaaatttaagttgggtcaagtgatcaatgacatattgatgtgtttgggactttgtttgccatactgcctatcctgaaagaaacataagcactttccctggtaggtcagctctctggatactggcaccctgggactatttctccccctgagtggggattctcaaaccaggctctgccatcttcaacattgtttgggtgaaaaagtttgtgctttcctaagtgtctcaggaaaagattctgtaacacactaaagaggctaaatgccatcatctggcaccacgacagttgcatttttgtttaaaataggaatttgaggatctaaagtatgtgagctagatatgaggaatattgtgaatgttagggatattgaatattcgtttacacaatatttgtcatctttgcacggaagtggtgagaccctaagggagagggaagaaaagggatgtgagttggcccccagcacctgcagggcctgtgacctgaccatgggagggctcagcccccatccctctgagaggccgcagggaccctccagtcttagctcccagttgtcttcaattccgctgtcttctctactctcacctgctgctaatcacgcaccgcagcctcccacaagcacccacctcatggccctcgtgtccccacccctcggacagcctccgccatggcccgtgcacttccctggatgccccgcgtgtttttgctgcaggaacttctccggaaccaggtcgtctctcaaggaaaccccttcctctgcttgcccctccctctccacatctcctaggccctcggagtcaagctggtgtcctctcagcccacacttttctctttgagatcagcacgttcctcctgagcatggcctgctgtgagcttcaggtcatttgtctcacccgcctactcttcctccttgtcatgcaacattgggtctgccaggccttccctgtaagctgttgaggctttctctcccctagaaatcctgcctccattccagtggccaatctgaaccccacatgaatgtccactttgcagagctggagataattacacaactgggctcacccattttactttaaattcctccgcagatacacactgggcaccgtctgggatcgtcctcctcttctctggctgctggatttcccgtgctcctatgcagctcttcatagcttaccctctgacctttcctaacctctcctctgctctccctcccttactccatggctgcactgcacacatctttttaaaatgtaaaatgataaagtagaaactatcagaagggacctttctcattgcctcacaacccagtctcaacctccttgccatttgcatccttctctggcacttgtgttcccattaccaggagagaattggccttgctccaagccgagcccccccgcccccattgggcttgggctcccccactcggggttggctcttgagtcatctgcactctaggtttcatgggccctccctccctgcttcatctcctacatcctacaaacatgctctcctctcccatgctcagccagtcaataactgaacagcaaacaaaagtccacccataaacctcttatccccctccgcagaattttttatccttcttcgtactgcttctaagagtggttgccatatgttgtccccactgacttgcctcccattccttcttctctctttccaacctggcttttttcccctccatcccactgggatattccactggataagacaatttaatgccaaatgatagtaacactaatcctcactgcgtgcttactatgggcttccagatctccatgccctctctgtgttccttctccctcggtggtggctccttctgtctcctttattagcttctcctccccaaccagacttctcactcccagacaactatcatgcaactcttcatcagcattactttaatatcatttacctactcatgacttctaaatttatgtcttatctcctgaactctctgcagaacttctgaatttcatggtaaactgactccttgaaaactccacttggattctcaaaggcatctcaaacttagcttgtttccaagtcggtcttgattctaaccgcaccataacccacacaccctttacacctgttcctctgacactgttcctcacacaagcgttaccactgcccatactgatgccattctctgtccctcccttcctgatgcccctgataacccatcaccaatttctgttgattcctgctcccaaagtacctggaatattttcattaccctctgtctttgggccaccactctagtccaagcctctagtatctgtttactgaacttgcgtaaaagtctactaaatgatctctctacttcctttcttggatatactacaatccatttgcgacacaaaagccagcatgttttttgtttgtttgtttgagacggggtcttgctgtgttacccaggctggaatatagtggcatgatcatagctcactgcagccttgaccttccaggcttgagcagtcctcccacctcagcctcctgagtatctgggactacaggtgcgcaccaatgcacccagctaattgttatatttttatgcagacggggtttccccatattgcctcagctggtcttgaacttttgggctcaggtcattagccagcctcagcctcccaaagtgctgggattactggcatgagctgctgcacccaaccttgagcgagttttttgtttgttttgttttgtttttttgtttgtttgagacagagtctcgctctgtcaccaggctagagtgcagtggcgcgatctcggctcactgcagcctctgccctgagttcaagcaattctcctgcctcagcctctcgagtagctgggactacaggcacgtgctatcacacccagctagtttttgtatttttagtagagacagggtttcaccacgttggccaggatggtctcgatctcttgacctcgtgatccacccacctcagcctcctgagagggtttttcaaaaatgtaaattaaatcagttccctgtcccaaaacggattccttaggaaaaatacaaattcttcataatattctccataatgttccgcaggttcctttcatatctctccttcccttgcctgccctgtggcagttgtacaggcctcctcgctaatcctgcagatgctgaaccaccttcccgtgcagggcctttgcacctgctcttctccagccagttcactgccccttctccttcacctgctgtgtgcatagctccttctcatccttcaaggcttggctttgaaaagtcccataccataagcctggtacctggtcacagcttcctctttgttttctttataccccacgtaataatttgcgatacttattcattggtgagtttatttggtatcatctcccagaaggcagggatcgtgtaatctggctcacagctgaattctccatgcttgtcacagtgtcctcagccacagagtaagagcacaacaattatcacttggattatgtaagacaagaatttggactttagtatttatgctgccgtaatttttaacttactttatgattgtgtaattttatgttctcacacacttttaaaggcatcaacatattttacaacttaaatatcagtgtgaaatttacaggtaatcataaatgtgtaatgtagtacagatttagtgcaagataacaaaccaagctattatgtgaatttcaagaatgggaaggctttaatatttgataggcgctgagtgtaccaagctattcagctggctgatagaattatgattgataggaaatgtgaaggaagaatcattcctggctttctacttggaggaaaccaaacagacgatgttctacacacagagagagatttattcatcttgtccttgtagatgttgaccaagataggagaattatgaaatttgggcaaaaaggtagacctgagtaaatgacaggtattctaaatctacatgttttacattgtttgttaattggttctactgaacttttttttactcattctaccagtatgtattatttatgatattaatggctcatcaccaatgaagtgaaagaaaatgtatatgatatttagggagaaccacagttaatgttcaaccaaatttcaaataaaagtccatcagtttttacatattttctttctattccacattgctatttctctgactagtgaaatatattgcattccttttcgatgactaatacaattatatatttgttgtacctagagccttatctgcttgctctatgatggtcataccagacttattgattcatctattaaatcaattccgtggacagaatttttaatacttttttttttttttttgagacaagagtttcacacttgttgcccaggctggagtgcagtggtgtgatctcggctcactgcaacctctgcctcctgggttcaagcaattctcctgcctcagcctccctagtagctgggattacaggcatgtgccaccatgcctgtctacttttgtacttttagtagagacgggttttcaccatgttggtcaggccggtctcaacctcctgatctcaagtgatccacccgcctcggcctccccaagtgctgggattacaagtatgagccaccacacctggccaatactgacttaaaatatttattcacttatggatttgtcaggaagaaaaaaacatgccatgatgcctcatttatagctatttgagatcaccagcccttccaacacattagtttcaacaattattcagaaatagatgtcaattagaagttccagcagaaagtgtggaaagaaatttcccttgggaataagtgttttatttggtagtgttgctaagtcaattaaattacagcctatattttgccaagatgtaaaaatctcaacatatctatgtaaaaagaaaaaagaatgggtttacaggccttgcaagttaggaggcaaaacaattttgtactaatttatatatgtgtgtgtgtgtgtgtgtgtgtgtatatatatatatatatatatgtcctatgtgtgctatatccattaatatcctatgaattgaaaatatccagtcaagtggtattgcttcaactgggctattcctatataaaggagttagttctcataacaaacgcaatgcaaacacagaggactataaaatcagcattttagacaaatgtggaaatggtaggcttttacaaaggataaaatctgttgagtttttgttgttttttaaagtactctgactgtcacttcttgtaggtgagaggtgcagggtgaatgtgggtggggagcaacggagtacaaggagaatttatggctccaactacacaagtttgtcaagtgacagagcctcgccaggggagtcctgatgtgccccatgtcagccccgaggccgagggattacagagcctttcccctcctccccactacagcttccccagctcattacagcttctcagaggggtttgcagtgtaccatggggctacaggaaaggatatttttctttttccctcttaatgataagaggtacaggtgaagagagccagcaaaacccagggcccttgataaaacttaaattgctggagttgaagactttgtgaaaatttaatgcattaaaatctgtaccaggaatcacttctgcatagaaattgatcctgcaaattactttccttcctccataaaagcactaaaatgatgtataacttaacagatacagatgatgcataattatagatttatatgtaaggtatacgattatacacatacatgtgtatgtgcgtacatatgcacatatatgcatgcatgtatatatatgtactcagcactttgctcgttgctctgtggcttacaaagatagatgtgacacagcttctcccttccaagatgttacagtcttgtcagagaaataggcgaagctgcgcccctctaggtcccagtagacattgctaactggggtagacccggagggggttagcaacacaagaagcttaggcgtacctgcttgcccgcctcccggccctgaatccttactatagagagtcatctgttcaccaagtacaaggaccccctccccttggttttgccaaccttccatctctcccagcccttcgaaatgtttcccagctgccccctggcggcgggttggtttgttttgtttcgctttgtctggtcttttcatgcgttgtggaatacacatgacaggcaagggaatttctcctttaagcttttgactaacaggtaactgtagcaaagcagctatcccctcttgctctgcttaaatgtttgaaaggagactttcaattctcaacagctaaagcataagggaaattctcttagaggtttggaaccccaaagaagcagtggggtatggctctccatacactccccgcgtcttcccaagtgccccttctcactgttgtctcactaaaggcacctgcagaaaataactgactcttaatgaatgcctttgtcagtgacccgacaagtgccccttgcctggaccaagatgagaaagccagtgttacttccaggaaccccatttccatggactgatggaatctgcccctgattctgctgtcggaggcgaaccagaccctatagaaggaggaggtgattttctgagccaaaatcaaagcgcgggtgggagttctgccaatattttctttagattagtttcatgctttctactctgggagcttagggcagtttatagtctgagtttcatttttaggtacacatttgtggtacacagacaaaaaaaaaacgtaagagagtgattcgggatcagcaaaaaggagaaagaaaaaaaaaagacgtgtctccttcactcacctgataaatcttttatatttactgacatttttgaataagtacattgtgcccatcactaaatgtataatatttctttcattgtgcatgcatgggttgtagaagcatcctcaaagctgagaaaaacgtatgcagcgatgtcccaattctgttgtaaaaaaggactgtcacacagaagtctgagctggagttgcagagaagcaccaagctacttcctttctaatgctgggttatgcctagtgaagccaagatctcaaagctgtgtaatacacctgactcaaatgccaccgaaagacaagagcaataaatcccaaaaataaatccacataatccacctcatttaggttatattttctccttatagtagttaaagatggcgatgttcatcactttcaagaaaaccatggaactcacattaagatacgtttgttaactacgtgctcataggagtcattggagaattctaccaaattccattaaattctggtactctgctcagtaaatagccacgaaaacaccaaggtgcttagagcaaatcctcaatcccctgctaacaccttatattacaaccgtctaattaccatgttttgcagtaaccttgtgggacttccacaagtaattagaactccagagcttttctgcagtaatccggtaaggacctcttaactacaaatgattatgcactgctaatattgtcgtgcccacgtgttttctacagttaattgtttcaattaatatttggctgcactacagaatttcatgcagtttcttatactatgacagttcatgagtcaactctgaagtcaatacatttccttcatctcatcctctctctctctttctctgcaatttgtttaaaataatcagttttctgatgagaaaaaaaaaaaagagaaacatatcacttccattaccttggtttatgtgaattcaggacaatttctctttagtttctctttaggcaagtaggttgatatctaaagtgattataattttcattaccctgtcacagaaatctccaaagagaggaaggaggcattgatgacaatttctccttggcatggtttttaaaactccattccaagcaataggttatattataggacaggggccttgttttttaaattttcagtcttcaaagaccagcacataatacatgctcaataaatgcccgttgactcaacaagcatttgtattctgccagtgctttacagaccgcagtctctcagccaatgcttatgaatgcttgaaaatcaatcgaaaacgtttctacaataagatgatcatgagctgatatctcaacagataattgggcatttataattataattatatttgtggataagatctttgctagggtagtcacatgacagcttcagtattatacatacatacatagatatatagatatagatatatacgtagatatatagatacatacatatagatatatacatatatagacatatacatagatatatatgtctgtgcatatctagattctagatatagacatatatatctatatagatatatatgtgcatatctagaatctagatatagacatatatatctatatatacatatatacatatacctatatagatatatctatagatatacatatatatctatatagatatatacatatatacatatatgtgtatatatctatgtatgtgtgtgtataatgtgtgtgtgtatatatatatatataaatatatatatataaaaaaatagataaatgtaccttacccaactattacagctttttttgttttctgggttgatttttctccgttcttgttgacttgtctttttttgtatgtgtctgtttgagcattaggcttggggataacagctggggggattctggacttagacccagccaattagcccctacttataaaataagagtttgcctctttagcccagggtctccatctgcggatagtcccccacagctgggtctctgggaagtcttactcaattttcagttccatcttgaagaacacctacaaaagctcttcatcagagcacacacagaaggcagtgtggcacaatgaaaaggtcctgggttttggcaacagagagacttgtatttacatcttagtttcactttaggaaattactcgggcacccaggcccttatttcattagtgcaagggggataattttgcctaattcatggagagacttgtgctgtacccacaaacctgcctggatcataggaggttcctaacgaatgtgagcattttgttttggcatttcagccctgaaaatgccacgatgaggcctcgtctcccctcctggccacaggcccccacagagagctgtcacccaggatcctctgagcaagctctcaggcacagacacaagaaagtctgcaaaataatctgttcttagcttcatcatattacagtcctaattgaatacacaccaggctgcaacaatcatgctttgtgtctaattgactggaaaatactggtcacttgttcttccagtcgggctgttagagacatcagacatttgctcagctttgatcccacctggaatcctccccttgccgtctgccttcccagggtctcctctcttatctggaaagtctactggatttcagatcctccttttcctatattctagcctttaaatagggtgttaattgtttgctgtccttaggggtcaactggagagtatacaaactgcctacaagatattcacgttccaacagcaagagaaagcatgcatcctgaccccaggttgcttggtgcccctggtcgcaggtgtggcatgcttgctcttggccataaagctgaacactttgtatcctgcttttcttcttgcatctctccttgtcgcctggttaggtcagcatcctctgaaaagactccctttccatgaccccatgactcctgggttcccctgttaggaaatgctttcagccttgctcagaactactccaaggctctggcaaggccaccacctccaggaagcctgccctgacttcacctgtccacactgagggccccctctggaaacatgtacagagtaatatcttattttattttatgttattatttcatgcctccctgattagatcagaaactcttttaagggaagaaccagatctaatgtaacttctatattataggtaatggcttcatagtcctgtaagttttaaaatcagagctcagcattaaaaatctgagctctagagtaaaactgcctacgttccaatcctgctccattgcttacagctgtgaaaacataggcacattttaaagcttttctgtacctctgctttctcatctaccaagtggacataacgctaatattgaccttttagagccatttaagacaattgagtgcttcgagtagtgtctggcaatggtaagcatgtggtaataatgggagctgctgctggcatctatcaccgtaattaaatgagtgattccaaatgccgttgatgtggcttttgttaatctctgagccagcatctctggtggaaggtgccttcttgaacttatgtttcatttagtcacttgacaaaacgttaatggaacaggcctgcccatgcatcattctcgaagctaggagcgtcagtacagtgaaggaatagaccacgagtcaatgctgcctgggggatcttccagctttgggtccttgaccatgttaatccacctcctagtcatcatctcctattattaggaatgttaatgttattcctaattcattaatatagtctctagggcagggatctcgaagccctgggccatggagcaaccggtgctggttcatggcctgttgggaaccagcccgcacagcaggaggcacacatctcccatagcaagcattcagtgaggggtcatgcttattacagaaatggactctgttgcttctctgtgccatgtgcaacatggcctctggcttttattgtttttgaaagcgaagtgattcatcgtgtggcttaatctaaggtgcttattttggacccactgttcacatctgtgctgcatgtatggttatttggaaactgtaatttggagatctgaaagtttcccaatttgaggagcattatacccagtttgaaaaaaaaaagaaaaaaaaacagtaaataattagcaaaatagacttttgttaagctgagttatagagtgaatatttatagttggcttttaaaaaacatattcatacatataaaaatccatgagctctactcttctatgatctctgaagcagaaaccacatatacccaagtggatgaatcaggtgctgccctagctgtccctctcagaggcccccgaagtcacgagaaaaaccccagggctccgtggaacagtttggtaatcacttgtttctagcaaagacgcagccctgaaaagcacaggcacgtaagaattatattcagggaccatagggcaagcctccaacagaattgaccagacttctcgatgatttattttgtcagaattggtgcccagaatgtatacaatatagaatgatactgttggctatactcattaacatatgcatgtacttcccctcaaaagttccctttgttgtaagttatcagagtgaggccttcctcggggctcacggtgtgcccggcagtgttctagggagagctcactcccggccttgcagggacttacgcaagtgggggcggaggacaaagggatggacgtgaattatatgttgggttggagggtggtgatcattgtgagataagatagaaaccaagtccaggcgcagtggctcgtgcctgtaatcccagcactttgggaggccgaggcaggcggatcacaaggtcaggagatcgagaccattctggctaacgtggtgaaaccccatctctactaaaaatacaaaataaataaataaataaataaataaataaataaaaaagctggatgtggtggcgggcgcctgtagtcccagctgctcgggaggctgaggcaggagaatggcatgaacccgggaggcggagcttgcagtgagccgagattgcaccactgcactccagcctgggcgacagagagactccgtctcaaaaaaaaaaaaaaaaaaaaaaaaaaggtagaaaccagtatagacaggcaaggagaggttgggagtgccagggcagaacagcaggaagaataatttccacattgtaaaatattcattccaaatctaatctgtggggaaaaaaaaattcatttcagccaataagttgaaacttagggaaaacaagttttattatgaaggcaatgagggactgatgcttcttagagtattacagtcttcagatatagcttagagaatcttaaactaaatattctctatcagaagcaggaaagaccaggaaccaggttggattggaaacctggactcttctctctcaacctctgcggccttcagagaaagggtgggcctggttgtcagatgagggggcgccacccctctgtgggcattcaccagctgtgtggtccaggttttgcctcctcctctgtcaaaatgccatggtgctactctgcgcggctgtgagaatccaatgagctaacttgtgaaaatgcctggcgtgattagagaggctccataaaaactagctttctttatcacttctgttttctcttcaaaaaagtgaaggggatgagcaaggcaataactgtggacactttgagcctgaaatgtccttgcatatgtgagagcttcatcaaggagagcaaccagttcttgctttccacaatgcacatgggaagaccctggaggtgtttcagggcagatgactaaaatattgttttgaaagcgtcatgaagattctcaaatattccagtgtattagtctgttctcatgctgctaataaagacatacccaggattttcccttatttataaaggaaagaggtttaattgactcaccgttccacatggctggagaagcctcacaatcatggcagaaagcaaaggggaagcaagacgcatcttacatgacagctggcaagagagagcttgtgcaggggaactcccaaaaccatcagggctgggcgcagtggctcatgcctgtaatcccagcactttgggaggctgagatgggtgaatcacctgaggtcaggagttcgagaccagcctggccaacatggtaaaatcccgtctctactaaaaatacaaaaattagctgggaatggtggtgcacgcctgtaatcccgggtactcaggaggctgaggcaggagaatcacttgagcctcggaggcggaggttgcagcgtgccaagatcgtgccactgcactccagcctcggtgacaagagcaagactccgtctcaaaataaataaataaataaataaataaataaataaataaataaatcccatcagatctcatgagacttattcactaccatgagaacagtatgggggaaaccacccccatgattcaattatctccactgggcccgcccttaacatgtggggattattacaattcacaatgagatttgggtggggacacagccaaaccatatcacatgggagttatttggaggatagttcttattaatttgggatggtgtaagtaacgtccttcccgagacaaagaggttgaatgcaatcaatctgcttgtgtattcaacagaggatcaccccagaccagtttgaaccctcgtggtgtgtttactgcccaggcctcatccatggggctgatactgggacaagcatttctcccaggtcagtggggatcgtgtctgaaggatgaagaacctgactgcctttctggaaagacagaggccccctgatgtgatgctctagggcacacagacactatccccagggagactttgccacaagatactttgatcctcggattccccgtccggtacaaggcagccaccttcggccttggtgtcaactccgttcagtttccttgccctgcctctgagatttgtctcatcgagtgtcttgttactcttatgcttctgttcccacacttcaattttgagggctttgaatcaggtcctcggagaaactattagatggcatgaccactgaataaatccacggaattaccctcacatgagtaccagctgttggagaaattgtctcattagctgacagatgcccttcagctttttagagtagatagacagagttgcatgaatgactgcaaggacgatgtcaaaagttggactcagcgtgaacccaggagaataggctgaattaagaatgcaaatgtatggctgtggacacactagcaaatgtgtttctttgggttaattctggcccttacagagtagttgtcaattatttgtaaatttacccagttattcttaagctaggtccgtgagtattttaaagcctctggaccatcaattcagtccagggagtgagacaattttgtgcatagggaaagcccacctgttccttggatcagaatgaaacctagcttgtggtttctccaccacacgggcctactgtttgttttttgatagactttcttcttcactgttttactaaaagttattgccctgataaattccttaatgaccaacaagtcaaaggtcttgatgtgagactctgcactgaatcagctgcaaagcttgggctcactgcctgttccacacctgtctatggcaaagctgcctgcccaagtgtcagccgttcattacagttgtaaaacccgaacttgattcaactaccacatccggtttctaaatgtgttcatcaatgttgcaaacggcccattcagaattatcactggaggacgtgggaccgagggaggccacctacatgggagcagtgctggcccagaggcatatctgtctggatcaagtgattagagactgcctggggtaaactgaggcaggaagtcacaggtaaaagagccctgcagtcccagtgaaacaggtagggcaagtagcagtaacgagctgtggaaatggggtccaggcctcaggaaatgcaggggtgaacctttgtgtacgtagttgatatagacgaggacaataacatccttaggttcaaagggacaaagtgcgtatgcatagctcccattcgaggatccataaaattaatcatgggcatccaggtgctatttttaatatttcaaaagcacttaaaggaaagtatatcttttcctttgaaaaggctgcacaatttaattgaaatgtcaagtcgctttgggcagaaattgtatcaactcgtttgataacattggttaactcaggctgatctgaagtcctcattaatagttacatgtgttggccgggcgcagtggctcaggcctgtaatcccagcactttgggaggacgagctgggcagatcacctgaggtcaggagttcgagaccagccgggccaacatggagaaaccctgtctttactaaaaatacaaaaactagctgggcgtggtggtgtgcacctgtaatctcagctactcaggaggctgaggtaggaaaatcgcttgaacccgggaggtggaggttggagtgagtagaaatcgtgccactgcactccagcctgcaggacagagcaagactccgtctcaaaaaaaagaaaagaaacaagaaaaaaaattgttacatgtgtctttgagttaaaaaaagacagaggtacagagagaaaggaaaggaaaaaaggaagaaaaagaaaattgctgaaatacggtttatttggcaaacatctttcaagtgtagcagtttggaaaagtagtgaaaggaaatgttgatggtgagagaatttaaacacctcatgccgactcttcccgactaatccgattatacacgtaagtatgaatagctattacacctcttcagtttttatattgcaaatacgttttttaaattttatgaataaaaggcacttaaaatagtgcatctcctgcttgttttaatttaattaatttatttatttttaggcatagtctcgctgtcgcccaggctggagtgcagtggtgcaatttcagctcaccgcaacctccatctcccaggttccagcgattctcccacctcagccaccctggtagctgggattacatgcatacgccaccatacctggtgaatttttatgtttttggtagagatgggatcttgccatgttggccagactggtcttgaactcctgacctcaagtgatcctcccaccttggcctccccaagtgctgggattacaggtgtgagccactgcacctggccgccctgcccctctccacttaatatacaatggagaaaatacggatccagtgaagtcaaatgagttagcttaaatcacgttaagaggatcctggcatatcaatatcttcttatttccagtaggggctttgaccagtaacccacatcatcttatctcacaaaaactgtatacctgtttcccacagtttgccttattattattttttgtcagttctctaacacttagtgaaattattagatgctctagtgtagatgcctgtgtaggcctcagcaggatgaacctcaggcagatttatggtcaatagaatatcactgtggccagcactcacatttgacttctgatttaagtaggtggttgcaggctccagccagcctgatgctggacccccacctgcaggtctaagacggatgtagaacccatcagtggtgactgcacccagggtttcggggagcagcctctacacctggtgaccacacacactagttgtcatctaccctacttggtaccaggttcaaagccatgcctctccagcatctgcgtgtgtgggagctggtggcacggggagcctgtggtgcctgtgctttgattactcagggacacattttaccctttgctatgttaccttaaagacaataatgtcatgttacttcctttccttcaatattaggtccatttcagtgacttttcacgtttataaaagctaagcctctcaccactaagatagaggacatgaaatgtgaattcagaagatggagggcagaatggaagattttaaagatgacgggagcacccctggtccttcctgacatccgatgctagaatcgtctgttggcttgaatacaccttcgagtgacaaaggtgttttcccctggattaaattcctgagaaagacaccaattcagtaataagttattcttataggtgaagctttggtgttacttttcagagaaatgaaagtatattttactatttatagaaaaatagtaaaataaagaagaggaaatcatctgcatttttaagaaaaatctacttttgaaactcacttttgaacgagagtcaaaactcaaggctgctacatttgatattgaagtcttatcaatcaaggcaggccaggttcaaataggagggctcgttaaatgaacttttccaaactattattttggaggaatgcagatagaatctttccaaatggtaatagtggttcagtgagttaaacgggatgtaatatgtgatacgctggatgtaatgcagagtgttctgaaacttgagcccacttcttcttgatcagccttatgtaactagccagaaatcgcatcctgccctgaacagcgattgctttttgagtgccatctcgccctggcttctgtgtttcctgccatgtttatggagtcatctggtatggtcatggctttgttctaggcagttttgctttacagtccaaggccctgccactcagtagctctgtaatcttgctgggcttcacttaccacagttttcaaatgggaataataacagagcctacttcaaagggttagtgtaaggttttattgagttaatatatttcaggcacatacagcattgaatgccataatgtgaagctcaaaaatgtgatcatattagatcttataattcttttcgtacttatttctatccacactttatttcccttgttaaagctgctttaaagtcttatatatccttagatagttttcagattgttctcccctctccatccctgcctctgctcttcattcatgttctgtccctcatgtgaacctcagccttcgcaagggcgcccgctgtcctcatcgctccatcctaattccctcttaagggacattgttctggtcaagcagtcccctgatttagttcattcccctttaagtggattccccttgccttcctggtgaaggccagatgacttcaccaggtgtgcctggacctcgccgtcagcccctcctcttcctgtgcacctgcactcgggcctttgtctcccatttccagtatgctcttgcagaattgacacatcccattgcctgattgcaccatgccctctctcatctctgcatctctttcttctgcctgtgaatgcctccgcctccccttcactgtactccttcctgcatgagcagaacgctgagctatgcttggtcagactgtgagctccgactcacacaaaccagagactttacacagtgttgagcttcactaaaccatgtcagagactcaggccattgaagcctcagacaaaacacaaatttggagctgtgagaacaggacctttcttcccactttgggcttacccttctgacccagaatagatgaggtcttggggtttctcagacagcagggaacattcaaaatataaaacatttctaatttgtacccccagaaagttgtatatcttacatgacattctctgggaagtcatgtcttaggaatcttgggttctgtttactaacagattattcctagctggatgtcctgctaaggacttcagagacaaggcttcttccttccaacaatcctggttgacaaggagattagaccaggtctcagcctccttttctttgccctggggatggcccccggtaaggggagggagtgaatggcaggctggttgcaactccctcttctcagacatgtgttgtcacagtgtttatccagggcttccacaaccgattagccactgaacaactgcagtcctaagtatgtgttctacatgtatgatctcttctcacctttactgctgctcagaaaggtagatatgattttctacattttacagacaattaaaggagtacagagaggttacataatttgccaagagtataaacagctgcaagcaggacagggaggatctccacagaagtctgtgttattcaaaagccctttctctttgataattcatgtgaacatcagccttgccatgagattttgagttctttgacaggtggtgttttgtacgtcccttacacattgtacaggcttagacttcagtgaacagcaaatgaatgaatggatgaatgagtgaaagaatgaatgaacagagacatttgttttcttcccgtgattccagggaaggatgtgctgtgttatacatagcaggtaacaggtattgattgggacttattttctgtaaaaggaagaattttttaagaagaaggatgcaaaatagatttttatagtctcacttttttttttgttttttctgagacagagtctcgctctgttgcccaggctggagtacaatggagcaatctcggctcaccacaacctctgcctcccgggttcaagcaattctcctgcctcagcctcccgagtagctgggactacaggcgccctccatcacacccagctaatttttgtatttttagtagagatggagtttcaccatgttggccagactggtctcgaattcctgacctcgtgatccaccctcctcagtctcccgaggtgctgggattacaggcgtgagccaccatgcctggccttacagtctcacttttaaaaatacagttgatccttgagcaacacaggcgttaggtgttctgagcccctgcacagttgcaaatctgtgtacaacttttgactctccaaaaaacttaacaactaatagttgattcttcattgaaaaccttactgatgacgaaaatagtcgactaacacctattgtggatgctatttgtattatataaatatcctcaagtaagctagagaaaggaaaatgttaagaaaatcatagggaagagaaaatatatttactcttcattaagtggaagtggatcatcataaaggtcttcatccttatcgtctttatgttgggtaggctgaggaggaagaaggggagaggttagtcttgctgtctcaggggtggcagaggtggaagaaaatccacatgagggggacttgtgtgtacagctcaaacttgtgtcatccaagggtcaactgtacccttcaccatgttggccagactggtctcaaactcttgaccttgtgatccaccctcctcagcctctctctacaaggggaacagaggctggagaagacacctaacaggaaggcagcaactaacactggagggggcatgtgcttttttttttttttttgcttgtttataatccctaaaattctcttgtgttggaaaaagaaaatatttttctaaggaaattgtgtttgtaagcatgtgtttaattaaaaggaaattattagtggtgatatccacattcagactattaatatttatttctgttaggtgcgtcatcattgtgatataggcaaatgggaaagggacacatgaaacttggtaaaactatgaaaaatattcagttcagtacagagtgtacataccttattcactcaggtcccactcaatagcattggcttggaagatttattcaattcactggaatttgtaaaacatcaagtgaaaaaagcaactgttttaaattttagcattaaaaactcacctatgccaagaaatttcctctaaatgtttagggaaattagtcactgtattcattttctattgccgcagctcaacaaattaccacacacttaacacaaatgtattacccctcagtttccacaagtccaggcctgagtaccaaggtcctctgctgatcagagagggtcttgaccatcacaagactttgcgatctgcctttcataatcctgtacaggtggctccacacaatactaatctcagtatgaaaacagaaattctcactgtgtttgatgaacatattgaatgaacgtattttgggatggagatattacagctagggaagatgtcagcctaattcgcaggcctggagtgaaagcattcattgtatggaataccgtgggttgaaacatgatttttggttatcttatgactttgtatgggctggaaaatgttagcaatgtaagctgcagttcattttcagttgctttaaaatttgcaggaaaaccgaggtacagtactttataaattaacaaacatggcttgcacatgtcttcacatctgtgtgttcactggctggaaggatgatgtaaaaccacatccagatgaactttagggaaactttccttatgatacacttctttgttgtgttgtgttcttttttccattagcaaatatgtgtgtgtgtgtgtgtgtgtgtgtgtgtgtgtgtgtgtgtgtgtgtaaatgaattttcaataaaagagaggtcatttaaaaagtatttattagaagagaaaagatgaaagttattttttggagacagacttgtagtttaaaaatataagcacttacacattctgtgtcattcactttggaatacatatatatatatatatatatatacatatatatatatattttttttttttttcaccccctgggaattttcaacaatactaagcagggatattaaatgatccactgaccccaagtcactatttttggaaagaaatggtcagcagtcttggcaaggactgaaaattttctctctttgggatcaagctttgtttcagttaagcaaagtgaattacctcgagtcttatattctgggcaattatgtcatgacaaatcttgagaataaggcatcagctggaagctaagggagttttatctcctaggtggtttggtaatcactcccaaagtttactacctgtagtattctggctgttatcccaagaaatgcgaatgcagttgcctttcgtatctgaagatgattatacccgggtgttgtttattcaacagggctattacaggaggattctaagttaaggttcataaaccatgggcattttaacaataaaaaattaaattataaacctgcaaagggtttcatgagattatcttactcagttcttttaattctggcttattttcatacttttccatataaggagattccatagactttcccatcagttttaagacttaaaaatccatattgtcctaaattagataaaatttggacatatttttcctaggtagctagtagaggtgaagtttaactgtttgatatctttctgataataatacctcatatacccagtagcatgaaataagtgtttcattaccaatttgataaaaatccgtttttctttttgtttttgtttttttctgttagcagcattttctgaagtagaaaggcaatctttactgagaggttcctacgccctcattatggtgctgttgctccaaagggggaatatgagggcaacattagagatctccatttgtccctagaaaattctcctgaggcaaactcaatctgctcactgctaacaagtgagggtgagtccagacattgtttgcatgagaccaggtcatcgagacaatgcaaagaaccctggatgctaactgaagctcaaatagccccataaaactctgacatctttaatgtaatggctgattaaaaagaatgagatcatggcctttgcagcagcatggatggaggtgacggccattatcctaagcaaactaacacagcaacagaaaaccaaatgttgcatgttctcacttttaaaataagagtatatattttgagtaggtatttctttgcatcgtgtacactgtatgcatcttgaatgtttgtttatctaataaaagttttaaaggctttcggaaatataaaagtgaattatctccacacacacacacacacaaaaaaaaaaaacctctgaagaaatgcaagctgaacaatgagaacacattgacacaaagacaggaacagcagacactggagcctacctgagcatggagggtgggatgagggagaggaccagaaaaagtacctgttagtttaggaggctgaggtggatggatcacctgaggtcaggagtttaagaccagcctggccaacatggtgaaaccctgtctgtactaaacatacaaaaattagccaggcatggtggcacacacctgtaatcccagctactcagggagctgaggcaggagaatcgcttgaacccaggaggcggaggttccagcgtgctgagattgcaccattacactccagcgtgggtgacagagcaagactccatctcaaaaaaaaaaaaatagaacaagaaaaagtacctgttgggtattaggcttagtacttgggtgatgaaattatctgtacaccaaacccccgtgacatgcagtttacctgtgtaacaaacctgcacatgtacttctgaatctaaaacaaaagttaaaaaaaaataccaaaaaaagtaaatgtaatggctatacctactgaaacatacacctttctaccaagtcgtcacagttattaacataatatttatatttggtgtgtgtatattcacaatgcagttgtgctcacaatttgtcttccatgttaattgtagcttgctgcttagacatatttagtgcttttgtttaattagccttcatttccaattgcatttctctgtcttcttcagtctctgtttatctttatagagtttaatttctgacttgtaatccatcccattcatcctataatttgccattcacatttcttcagaaatgtgggggatcattcagttttatatttccaaaagcctttacaacttttattagataaacaaacattcaaaatgcatacacggtgtacacaatgtaaggaaatacctactcaaaatacatacttttacttttaaatcttttatgctttatgttaaattcaaaataagtaaatttatttaatgatacatgtaaaaaatcttagcctgcttccaaaaaactattggttgtgtagaaatgcctacagttattatagacagtcacagagagttcagagtagcaggaaagatatcaaccatgagatgggcctaggcaatagttcacagtgttttttcagtcatgacccaccaggtgggttctggccgcacatgtgcttcacacccatggatgggtccattgtttgtgccttattcctgtaaccctgcatacagctccatcttttaaactcaacaagaaaacatatcagaatgcaacacatcagagtgcaacatatcaggattcaacacatcagaatacaacataacagaaagaatgcaacacatcagaaagaatgcaacatatcagaaagaatgcaacacttcagaatgcaacatatcagactgcaagatatcagaacgaatgcagcacttcagaatgcaacacatcaggctgcaacatatcagaaagaatgcaacacatcagaatgcaacacatcagaaagaatgcaacacgtcagaatgcaacatatctgaaagaatgcaacacgccagaatgcaacatatcagaaagaatgcaacacttcagaatgcaacacaccagaaagaatgcaacacatcagaatgcaacatatctgaaagaatgcaacacttcagaatgcaacacaccagaaagaatacaacacatcagaatgcaatatatcagaaagaatgcaacacttcagaatgcaacacaccagaaagaatacaacacatcagaatgccacatatctgaaagaatgcaacatatcggagggcaacacatcagaaagaatgcaacacatcagaatgtgatgtatcagaaagaatgcaacacatcagaatgcaacacatcagaaagaatgcaacatatcagaatgcaacacatcagaaagaatgcaacacttcagaatgcaacacatcagactgcaacatatcagaaagaatgcaacacatcagaatggaacacatcaaaaagaatgcaacacatcagaatgcaacatatcagaaagaatgcagcacgtcagaatgcaacatatctgaaagaatgcaacacatcagaatgcaacatatcagaaagaatgcaacacttcagaatgcaacacaccagaaagaatacaacacatcagaatgcaacatatctgaaagaatgcaacatatcagagggcaacacatcagactgcaacatatcagaaagaatgcaacacatcagaatgcaacacagaaagaatgcaacacatcagaatgcaacacatcagaaagaatgcaacacatcagaaagaatccaacacatcagaatgcaacacatcagaaagaatgcaacacatcagagtgcaacatatcagaaagaatgcaacacatcagaatgcaacacaccagaaagaatacaacacatcagaatgcaacacatcagaaagaatgcaacatatcagaatgcaacacatcagcaagaatgcaacacatcagaatgcaacacatcagaaagaatgcaacatgtcagaatgcagcacatcagaaagaatgcaacatgccagaatatgcaacacatcagaaagaatgcaacatgtcagaatgcagcacatcagaaagaatgcaacatgtcagaatatgcaacatatcaggaagaatgcagcatgtcagaatgcaacacctcagaatgtaacacatcagaaagcaaaagccttagaatgaagtcctcacaagtttcatcttgaacatattcttgaactatatatttttaatttgccaattttagtgctccctcagtaatcacagactccttttgacacacatcacatctgagtcagacatctcaatgagtcaggtaaaactgggttttttaactggcttaagtgaaataaggaatgagaaattgccttgaactgtaaaatggtctacaaatgtaaagttggaagacattttttgaattgattattcctctacctgaagacatttttccaacctataataatcaaatgtaataatatcttcacttaaaaatagagttgacttaactgttactttacacacatgcgcaaaaaaaaactgtcatttttaatttttaagaattccatccaaagaatttcttaaaaagttgacttttttccccttaattatttttgaccttgggttttatgtaaagcttggtgtccttttagtgttacctagtggtgttattagagttgaagtgtctaagcatataggagagtataatagtcaatgtgaataatattaaaccttcttcattaaagagcagtgatacacattctcagctgcctaagctgaatttgagaattacaatagtaaaagaaattatacttcatgggaagagttgaacaaaggaagaataattgttgtatgttaattccttctgtttatctcattcatctttttcaactgttagaattatttcagaggctttagatgtacatctaggcacatttgagtttgattttatgttggttgaatgcaggcaaactctagaatgccatgattacttttcctgcaggagaggggtcactgcgtaagaagatttgttaagtatatgctactgtgtatttttataatacaaaatatgttcctgctattaggctcctgcctggtttggcctgtttatgttttgaagaatagtggagctgggaactcatacggtggttttgccttgtgccccaggagcctacatgccatcatcatggggagcaaaatgcccctcacccctcgctcctgagggcattgctgggttcaaaagcccaaaaagaatattccatcagaagataaataaatacacacttgaagaaagcctctcctttttttcctgtgtttgtttttaaccatgagcatctattatgtgattgtgtaaaacaatattttccccccaaatttgtacagtacgtgtgcagcctggttctcctgctatatattctactttcaatcaggtggggggcggtgacaagcccctcttcctctcaaccttggcaggtgcagtgcgagtctggtgggatccctcacacggggttttggagggcagtgtaggctaatgtgactggttgttcttgaaaattaaaagcaaaatagagaggcaagatttgctagctaaagaagacactattattggtttcattttgagaatcactcattttctgtgattaaaatttctataggtgtggaatgtttttttttttctcacattttggtaggagaaaaacaatcattctcctagctccacctgctgagaactgagagaactttaaacagatagacatcttttcaaattgtcaaaaactttcccagcatcttttagcccatgcaaagtattgtcaaagcgctaatttttacactgaaatgatgagacaaacctttcgctcttggaaattcccatcagtgaagcgaaaatgggtgatgacgggcatcttccactggaataccagaggccccagttctcaattaatttattaatttttaaaatctgtttttaataagatgatatgttcaggatcattttctggggtatggaattgggttttcttttcattaaattaatcttgttattcagagaaaagtaagtaggaatacacggcaataaataagccagtcttactgaaacagaacaaaaaagcaaaacctttttgtaagttgcatagtgacagcctttactggcctcctttattgacatcatgaagtctggtaggaataacagctaatgcaatgtcctgtgttctgatgcctgtgtgttaagttgctaaaggcagacacagaaggcttaaagggggacttagactgtccctccctgtgaagtagatccatcaacacaggatgatcacagcaagcattttaaaaagaccatacattgagcgaatccaggaagtcatgctgcagactttctctacaatcaattggatcatcttttattgatccataattaatcatttgcaagtttcttcatttgaggctgcttccattacatccttgttatctaaaagcaatcccctctcatgagcacattaggccctgttatttatgggaaggatccatcactgagttgcactgtgagttgcaggagaggaggaaggttggggacccggctcactgtgtgctctgagcactccctcttctgtccctctgcagagaaacagtcctcaggataacagcgggaactaatgcatttgccctgcaggggttggttggacggctgagaggtgtgagattgttcctccccactgcctttgtccaggacaagaaaataggactcccattgtgaagaaacgacagctagccagcagctccctgggagttatggagcccatcgccacccttggtttctcctgtgtgtgtctcctgttctcttaggatccatgacaagatccttgtgaatgaaaagatccgcctcgtccagacactacaggcaggggaagaggggaaccgagaagtcagggtctttcccctgtttctgacctagtgacaacatccaggacagaagcagcctactttcagatgtgactggccagtatcactattttggaagagccaaacaaagatctagaacaagaagaacttccttaaattgaaagaatacaagcctagattttattttcatagtttcagaaaatgagttgtgattcctgattgggagggcctatagggtcctctagggcatctctctatctgacctatcaggcatctatctctttttttcttccatgtttattatcattatctttgtttttgcctctctcatcaaatttgtatgtcatggtttttcagttttggcatattttcattttgtaaatgtcacttatgtaaatctactaagtagaggatcatttagcaaatcaattactcataaatgatgaatttatttttcttcttaccaactgtattcaaatgatggtcctagagggacattcttggattcaagatcaagatgactccatggatcactccttaggaaaaggaaatgaaagggaaacccacacttactaagcacctgccatgtgccggataacacattaagtgctttcacgacataggttactttggcagattttttttccacgtgcaacaactgaatgatctgtcttgttatagatttactctgtttacatagaataaatgccatttttactacagcaagtggtcctcagaattcttaacagtaacagagtttccagaaacacattgaatgatatgacacatctttgaatccactggaatgctatttttacatagaaaaactgtcatttctactacagaaagtgaactaaattttatttcagtccctctctgcaggaatgagtgtctcatagcagggccgcagatttacaaggtgcacattgacgagagcctcagactaactttatgccttttgatttgtgaagtgaagtcagtgccctcatttccagctgcatacgacactgccttctcctggtataatggtcattgaatgtgctgaaataaatgtgggacatatttcatttgaagggacaaaactcagagctgctgtagttaacctcctgctctgacagtatatggaagatcaaaaactcaagagcaatgaccgaggatgggagaagagggactggtccctgagaatcacagcatgtgccaggcatggtactgggatctttgccaaaatcatctcatttaatgctcatttcaaccctgcaaacaaagaattttctttattttgtggatgaggaagctaagtattaaagttaattgatcttcctgagactttggggctcagggctccaggtacctccaaaacccagcaggctctttttagtgttggcaataatgactgccacaaactgcggaaatgggtagggtgagccatgcggttagccagtgactagaagggatgctttgtgaatacctgtgctgtctttgaaatttgtaccttaaaagattcaggctcttccctgcctgtgcctttagcaaatcacttctgcatctatcatccatgaacccttctggaatctaatgaaatatttaggtggtactatctttgaagataaatgattccccacttcatcaggcaccaagtaatgtagttcttacttttatttgtcctgagtctactgccttcaatcaatttatgatctagtgaactggtctgaggttaccctacccattgtctttataattccagagacctggtttgttgaattatttaaatgtttgcattaaacaaaatttttaatcatttgaacatttatccaccgtgttaggccgtcctgcattactataaagaaatacctgaggctgggtcatttataaaggaaagaggtttcattggctcatggttctgcaggttgtacaggaagcatggcgccagcgtctgctaggctcctacggaggcctcaaggaactttgactcatggcaggaggaaaagcaaaagtggtatctcacatgggagagcaagagcaagacagtggggcgaaggggaggtgccacacactttgaaataaccagatcttatgagaactcactcactatttgtgaagacagcaccaagccatgagggtttcacccctatgacccaaacacctcctaccaggccccatctccagcattggggattacaattcaacatgagatttggttagggacatatatccaaattatatcacccacaattaaactttagttattgatattatcattctaataattggtggggaattctagtaattgccagacctccgggtatataactggtcccagaattataaaaatgtgttcatatttttcaccctgcatgataaaatacaaagaaaaacaaaatgtagcattttagtacagaggctatgaaaattattacagcctcagcatccagaaactaaatgatattagatggctagataaaatgtatcaggctttggacaaatcaaaatttgagcagaaattgcaaatgtaaccagcagtactgagagtataatttttcagctttccaattcacactatcatcagaggcaccatccctgagagagaagcaattcctgaaagtatgaacgcttaccatatttttcaaccaggtctcttttacaaatgcagaatatgactgtcacttgtagtatgtccatacataagcttttctgcattagcacatgtatatcctttcaaatttagaaagttgcaatatccttgtatcaaaatatgctattcacgatcactttgaatcatttaacatgaaagggagctattagctcttcagccgttcccctctgcagtagcattactaggacttggcagataaggactcttattccatgtgcccgtcctttcagggacagtagatggggacccttaaatctagacattgcagactcaccaggcaagaagctctacttcccccagcatcactgaatggagaaatgttgctgaaacatctaccttcccacattttctaaaacacactcacaatggaaggagctgcttccacgcactcacagtggaaggagctgtaggtgagtgcgcagtggagagggtggtggagacaggtgtcttgaagaccgagccccctactgttctctgtcttccctgttgaggccgtgagggcagaacaggtctgctgaaccagcttgagggaagcatccacaggaaacacccatgagaggagaaagaagggagcggcaaaggcagcctgcgtggattctcagagcatggggaggactgtgcccagatctgtggctccactttcttttttcagagagtgtgtgattcagtttccaaggtgactagtggccctgggtgtaaagtgatagactcatttttgtgcaggccattgatcatgtctacagtcgtgaaagaaagtgtctgtctttctttctttcatccctgagtttgaacttcaacctctagggctgcccatggaccctgcataggtcatttctcccagccgccaacaacaggagccagaaagccaaaatatgcaagatggggaccccagcagaaactgtaggtttcccctcccacaccaatgctttccaatgcaaagatccttgctctaagtagtggtgggaataggagaggaacagagactttgggttaaaacataaacatattaccatgaactttaaaagacatgaggatttgtaataaacagtgatctgttgtgtgtcactttaatcatgtagacatgcacttttttttttttttgagagggagtcttgctctgttgcccaggctggagtgcagtggtgcaatctcggctcactgcaaactctgcctcctggggttcaagcgattctcctgcctcaccttctcaagaagctgggattacaggcactcacctccacactcagctaatttttgtattttagtagagatggggtttcactatgtaggtcaagctggtctcgaactcttgacctcaagtgatccacccgccttggcctcccaaagtgctgggattacaggcatgagccaccgtgcccagccagcgtgcactgtttaactcctaaatgaggactctttttaggagaatgggagaacttaaaggtctaagggagatgtttcaagagctaaaagtagagggaaatctttaaaggttaaagtcaggagagaaaacccaatgacctcaaaaagaaaaacttcttagagaatttttaaagaaaaattgtaaaaatgcaagaccaaacaattccttaaataagaggcatagacaaattaatgtcaaattaaaagaagaataaaacaccatttttatctcattataaaatatttttaaatgcattcaatgttccattttgccctggattcatggaatcacaaaaaatactgacaggagtataaattggatcaacttcgtggggcagaaatttgctgatatatcaaaatattgaaaatgtttacacgtttggaccagaaaatagactgttagaaatttatcctaagaaaattaccagatatgtagccagggttatgttcattgttctgtagagcgttgcttatagctgtgacaaagtggaaacaagtcagagttcaacaacaggtgctgagctaactaaattataatacagtgttaggaggagaactctgtgctaccaaaacccttcttgtagataagtatttactaatatgaaatatactaagtacaatgatattgtaaaataatgtatacattatgaatccagttacgtaaaaatcaatgcacacaaaaatattatgatatttgtatgctgggggcattatggggatttgtgctttcctgcttttccccccgaattttctatatactcagaaaatagttttttggtttggttgtggtttgtgtgcatgttgggagcagaggcaggtgttaaggtgtttaactcaagcctaaggagggttgctgagcctgacttaccagtaaaggcggagatttagaggccagtttcccagactatgaaagaaggagtaattggtgctttcaatggattccctccctgtgagtctgagtggaaaaaattagcttccaaaccaagtgcttctaaggtctttttctaatccccttttcaaaaacttctcattttatccggacctgaaagctggggtcaaacagttccacttaatctgtaaaaactgagattcacatggaatctgccacttacccaagcagaactgtgtttgggagcagtgatttttaagtgtttgaacttttttctgttcaccgagtaggggtgacaccatgacccagggaggcagcagccctctgaaggcagcagatcacggtgggtggcgtggctgacgggccatccacgcagccccagcacgggggggacccagagcccaccaaagagggccctgaacaggtgcgtccataaaatccatttatgttttctggtgtgatgggactgcataaacaactggccttagaagcctttttaaattttattttttattactttttattattttatcaagaagtaaataatcactacttagccttaaagctctagtgtcctctatgtagatctggcatctccgtttttagtcaggagggctggcccttgagcagatgcaggcacgaggaaagccatgggcaaggcagggatgctgccctgctagagaaactatgtatcccaccctcacatcggtcctaaatgcactagcaaagtgaattttgaaataaaaatgctcaaatgttctctctattctgcatattctaatgaaattgacttttacaaatcagttggtcatatttcaagggacagctttattttatacttttatacattttatacatacacagttggatcaaaatcacattttaatttgacttttctgtttagttaaaaataacaacaataacaatttatctttcccaaacgacaaactttataaacttgagggacctctgcccatggatcggatgttatgtcgcaccttcatcttattcatatcaaatgtgattaccaaccattgggaaagtttttccatgatattcctctagaaaatccagcctaagtccaaaagctttaattaaaaacagtctgtctgcattatgaacgggaagtaatgcatacttctgaaatgataaggttcacttaatctctctttactcttttggagtagaactgattgagaacaacatttgctaatttgtaaggtcaagatatctttatttgcaggatgaatgaagaaatatacaggacttaaaaatagttaaaaaaaaaaaaatagttttaaaagtacctatgagaatatactaacttcttgtagaattttctattttgaaagcaaagggcattttcattgatgacagatatttttcttaatcatcctggttaggaaactgtacatttaaaccttcaatattattgatgaagacagttgcacattgtctgtaggatggagagccccttctcagatgaatgccaggcctcctctctgcagggggtgactttcttctgcccacctgcccccccccacctgtgcccatcagtgccctctgaaatgtggggcagatgagtttgcggtgcctccagatgtgcttccagagcagaccctgcagtgtcggggcacaggaggattgacagcattgagtcccaattcaggatgcataagttcagatttctccaggtaccagctgtgagttaccctcctgcataaggtagggagatagtagttacctgtggtagggctgctatgagataatgcacatgaagaccttcacgtcatacctggtgggtgattagctcttaatgactgctgctactcttttgaactttttaattgttgataatgttttttattattgttagtatggttaataattatcaggtggcagcacttcaggcttgtgattattcttatactttagccttaattatttttttcgactttccagtggaatccaatggttttctctgttggtttgttgtgctgtaatcctagtaagaccaggaagcagaaccacggaaaactggagcatagtgcaaacggggaggcaaaactggagttacacgagaaagactgcagagccacggactcagtgaagtgggttagaacagcgggctgggtgcagtggcctatgcctataatcccagcactttgggaggccaaggctggaggatcgcttgaggccaggagttcaagaccagcttgggcaccatagcgagaaaccgtctctacaaaatatttaaaaaacaaaatagccatacatggtggtgcatgtctgtagtcccaggtactcagcaggctaaggcaggaggatggcttgaacgcaggagttggattagcaagggtcatcaggcagtattacatgagcttctcttatcatgataggagaacaaaagacttatataagagggacaccctatgaaagatacaggctaaatagtattatattcaattcattttattcctgatttttaaatgtgcacacagagatgacttaaattatatcatgatgtccataatcacacatgatagccctagtcacatatctgaaagcagtgttgcagacaagaaagcttttgtggtacaaaggtgttgttgggtagttgctatagagactgcaagccccacaaagcctgtaatgttggttagctggtccttcacagaaaacatttgcccaccctacactagatgcctggcaaggtagtcttctgaaactttgcttgccctctcttctcctttttccttcctctcttctctctttactttctttatttctcctgcaactcttgagaaatacttaaaaatacttaaaaaaaaaaaactccattaatgaagactgtcagcacaacagggaaatctctggaaggagagactcgagaatgttggcaatccgtacccttcgctaggcgatgaggggtgatttttttcccctttcttattttgtttatctccattttctagtttttcttcaaggaacatttaaaagctgagtaattaaacagcgagcaaataagaaagtctttgtaatcagcaataatgtcaggcttattgataacagtcttagttatgagtgaagggattggaatgtaattagcctgctccatgagattatctataattgtgagatgccgctaaagccccttcactggccctctaatcatgagactcagaagatgttctggagcagttattcttaaattttttttctgcaggataacacacttgaaggatagaagacctcttgagtcactgaacgggaggaagatttaaaagccagttgcacccatcatttccagaaagagtgatatttacaatatctaataacctgtttacaacaggtatcaggccatcagagggtttgtctattatgggtgcagccttactggcaggtgcctgctagggatagtcccgaggccactgggctgtttctctcggggtgcccaccctagggaatgagaatgaccctgagaaggccacacctttgcccagcacatctctagccccctgaaattgggtggactcatttatttttttcattgactagtttccttggttcccaaggcaccatcattcatgcctccaaagaatatttgtcaattaccttctacatgcactctctagtgtgggatataaagaagtagcacccatgtcctccacactggatcagtctcagtagggaaactgagtcatatgggaattattaggcgaatgatgtttagtgcccatctcagtcttcctgcagttgcaccctggatgccagggtttgaggtgcctcttggtgattgctatggacgctccttgagaatgtgtgaaacctctcttcccagtacacaacactttgcctggctttcaaatccgttttctcatttaagaaagttaccttaattattaataggctcaactaagggcagtgaaaaaagaccatcttgaaaaatgtatcttccaaccatcgcaaggcacattgtatgaatataaaatatttataaaacggctcaattttagtgatacgtagtagctagctctggtcgatgtgtttctccccacgttctgccatgcgtctgttttgctggaaacacacacagctgagcgcttttccctctgggcatcctcttcactctcatgcacaatgacactgaggacctgagcaggctccactcaccatggaaggggaaagctgcctgcatgagcacagcgggatggaagcgggcctgggccaaaactctcaggcaggatccaagtcccacccctcgcgggcgtgacacacaggcacccccttcctctcttagaaggtcttgtgtaaagagtttctgtgtctacttcacagagttatcatggctactacaaagtataattcaaatgtgagatgttatgattgatacaaatactaatattgatttgctgaccagaagatatgaataagaatcaaagtattcacgaattaggaacaccggaagacatttccctctaccgccccaccatctccgcaatctgcttcttcctcctcatattcctgctccccacagtctcgtagacagaccagcccttggtgcgatgtcagaacacagatgtgtcttgaagcaggacccccaccctttgactctctcatggtgttctagtgtcttcacagcacttattatggtgtaaagttatcctgtgctatggtttgaatgtgctcctcaaagttcaagtgtggaaatgcaccagtgttgggaggtgggtgggacctttgggaggtgaagggggattcatgccattctcagtcctcttgcccgtccgcattccatcatgggctggtacagcaagaaggcccgcactggatggcctcctctcgatgttggacttcccagtctagaactgtaagaaagaaatgtctgttctttataaattatccatctcagttagcctgttacaggaccacaaatggactaacacatcctgtgtgtttcttgccatggttgtttcacatctgtccctagtagaacataagacctctgacagctgggtgttggccagcccagcctacatgacatgctctgcacacagcaattagaacacatgcccgtgttaccctccgataaccagcccacacttcagtgtgatgcttctctaattatggttaccaggctcatcttgtctttccctcgctcaagaactccaagtggttccctgttgcttattgtttctaagctgaaggcctcttcccagccgcctggtctctcatcacattctgctctggccatgccaccttgggggccacttcacctcccacgctgcccccactgcattgccgctgccttccagcgtccacttggcactgttttgtttcaccattgttggtctaatagatttcctgataattgttctcaagccttgtctgcccaacctcagtgaaaatatcttaagtacatagcctttgtttcttttccccccctcttgagacaccttgcacataaaatcccttaaacacaataggtactcagtaaatgcctgttgacagatgggcttagacatagcgtttaggtttatttgtttgtttgggagaaagaggttaacagggctgagacggtaagagcattttttttgttcatagtgcagccatggttttgaagctaccagcagcaaattgccacccacgcataaggaaaacagatttctatacatttagggggaaaaaagcactgctactttcaatgcagccagctatatttcatgccagtggcatgttggaaataaagagaaacagcagaggcccagaaaatgcctctagttcctcctcatttctgaattctttatcagcactgacatctggcaatagaatattactccaacagcaataatatgaaaagagcatcagatacaaggttgctgtgagcatcaaattaacccagtctcctctgtattctatttgaccaggaactggagacacagtggtgcttagaggagctctggggggattcaggagaggagtcggtaagatgggcccagcacagcatggtggctgtgtcgctaaaccagatccaattccccagaagagcttgttaaatatagatcacagggccccaccccagcgcttctcacccagtctgtctagggtggagtatcataatttgagtttctaacaaattcatagatgttgctgatggtgctggtgtggagtccctgagagctactgctctggcaaacagcagagcagagggtcctagtggatggtaggggagcttgtgaggactgagaagcttcccgtcattccccccagtgactggggttctgcatcagctctagaaacactggatcctctcagccacagctggctatgtaacgtcctctgtcagctgagatttaactgagcaacatcctaactcaactggatggaaactggggcctgggcaacagtggtgaacctctagttttcaccgcatgtttaagaaggaacaatgtcagtttttatttagaactagccagccaccctaaatctataaaagctgttaggaggacacatctttaaatgaacataaaactatcatgactaacctaatctcctttatttttaatgaacacatatatttgtcttgaagagggatacatattcactgagtaaaaataacatacagataaacaaaaataagagaactaagaaatacgcataatcccaccaccaagaaaaggctgctatggcgttccagatattcagaggtaattcagatcatcaccgaaagtcaggaagacaacgggattttttctgttgagtcttccagtcctgccattctctgattcaaattatatttgccttttgttatctgctacattgggttctgtgttaccacaggcagccttctaatatcagtgaatgatggacctcagagctactccgcctccaggaaggcaaaaccataaaaaagtctaatgtgcacattttcgttataaaaacccagcaatgtggactgagcggaggtgcagctgcttgtgtctttggcatgcagctgccttgtagacgaggaatgttattatctctggttatgaaagtgttttaggaagcaggcgggaaggataatggtaagaataccgttcaaatatggcatccttaagatgccgtatttgaaagatgtgcaggcatctggaagtttattgtggggatattccaatcctgaaaatgccaatttcaaggaagtaaacactgatatgtgtctttgtggggtggcggtggggaacaaaagcgaacacatctctcaccggttctgtcctgggaataagaacaagtgtcttaccatcttcattctttcataatgcattcactaatctctgtgtgttcatttgagaactgttttgtaagtgtgaaagtaaatgagaaagttgtctttgtttttctcttttctgtgtttacggtcttaaatggccatttaaaaaaagtgttttacatggagtacatggacactccctgtcttagtctgtttgtgctgctacaacaaaatgccacagactgggtcatttataaagaacagaaatttatcaccctgagctctggaggccgggaagtccaagataaagacttcagcactggtgtctggtgagggctgctctctgcttgcacgatgacacctccttgctgtgtcttcacatggcaaaaggcaagagagcctaatgcggagtaaagcctcttttataagtatctaaatcccattcatgggggaggagccctcgtggcctaatcacatcttaaagaagccatttcttaataatactgcattggcaacacctgatttttggaggggacacattcaaaccatagcactcccttctaagccttatggtgagggctggggctctctttcttcccctcttttcagcatctgagattcaccatggccatagttgcttgtcatctattgctaatattgaattacagtgtattttgctcagatcaagccactgtgaatcaccgtgtgtatccgtcgttctcacgttgccaataaagacatacctgaggctggataatttataaagaaaaagaagtttaatggactgacagttccacatggctggggaggcctcacaatcatggcagaaggggaaggaggagcaaagacatatctttcatggtgacaggcaagagagcgtgtgcaggggaactgccctttatagaaccatcagatctcatgagacttattcactcccacgagaacagcatggcaaaaacccggccccatgattcaattacctcccgccaggttcctcctacagcaggtggggattatggagctacaattcaagatgagatttgggtggggacagagtcaaaccataccacggtgttacaaacctggagcaccctttttagagcagcataaatgtgaacaagtgagtatgagccagagtgatggacagtgaggtcgtacaaggaacagttgaaaaatgtgtgagtctagtctgaagaagagctgtggtgtaataggaactatatttggtctttgtccccagttactgtcatagaggtcctaaaaacctctggaaattttggagtgatagtagtatattttgttattcataattagccccttggataactcttatgtttatgctaatgcatttactcagggtgcaccccctagagagcctccagattggcccagaaagaccaagtaatttgaagattagagggctggaactttcagccccacccattgacctctgggaagggggtactagagaccaagctccctataaactcttgaacaacaagatttgatgagcttctggggtactgaacatgtagagatgctgcaagggtggcagctccagcaagggcatggaagctgcatccccccacctcaccctattcatctcttcgtctggtgttcatcagcatcctttataatgccttagaataaaccaataaatataagtgttttcatgagttctgtgagttctgtgaactgttccagcaaattaatcttacccattgaggaaattgtgggaaccttggtttgtagcccatcggtctgaggtacaggtggccccaacttgtgattgaggtctctagtcttgtggggctgagccctcaatctgtgggatctgatgctatttccaggtaggtagaatcagaatcgagttgaattataggatacccagttggtgtccactggagaactgcttggtatatgtggcaagtcccccccaccaccatctggtcatagaagtgttctgtgttgagtgtctgagtgcaaggacaaaaacagtttgtttttgtttttgtttttgttttccttattccagaacagatatggtggagattggggagaatctgtgagatagtcatgacatttatatacgtatatgtttttagatatttgagtcctatcaagtgaaaaagagagtagagttcatctgtgttgtttcttacagaagaacttagatccatatggaagtaaatttaataaggaacagatttatattcaaaataaaaacaaattttagaattagtgctattgaaaaatggaatgagactcctagagaaatcataagctcccaggtattggaaggtttttttgagagtctgaatggactagtttcagaagtatcgtaaaatggattctaatactggatggaaaggtgtcatagatgttctttgaggagtattaagagctaagatacggaatgtatccttatgtgttacagagtcagtatagcaacatcctaacccagcttcctgcccacatttcatccagttgaccccattgtttctattagaataacctatttgctaataacctaactttaagccattttaagtgtcagtagtgactccattactgcttgttatgtgaaattcatttacttgaggcccacatttgaatattctcccaagtgatttcccactttcaatatctggtctctgttaccataatgctaactgagttgttacctcacctcatgtattagtcagggttctctagagggacagaactaataggataggtgttgtatatatgaaagggagtttattaaagataattgactcacatgatcacaagataaagtcccacggtaggccttctgcaagttgaggagcaaaaaagccagtggtgatcaggccaagtcccaaaacctcaaaagtaggaaagccgatagtgcaaccttcagtctgtggctgaaggcccaatagcccctggcaaaccactggtttaagtccaagagtcaaaagctgaagaactaggagcctgatgtttgagggcaaaaggcatccagcatgggagaaagatgaaggctggaagactcagccagtctgctctttccatcttctgctgctgccttattctagctgtgctggcagctgattagatggtgcccacccaggttgagggtgtctgcttctcccagctcactgactcaaatgttaatctcctttggcaacaccctcacagaaacacccaggaaaaatactttgcatccttcaatccaatcaaattaacactcagtattaaccatcactcctctcaactttgttcttctaaatttctcctttctgccaatctaaatgtatttattattattcaaatttagacaaatcttgaattctgaagcagttaaacctcttttccacatatgacgacttctcttctgacacattctgtatacacacagtcatagacatacaatgcatatatgtacctttctatatgtattaattcatgtataatgtatacatgcatcagtgtgtatttttactgtagtaacaatgcttcctccatttgcattaccatcgtgctgctttctcatcgttatatgtatttccctttcttccattctaacagtaaaactatcaaaggcaggaaccagacctgtaatgtcttttgtccttggaatgcttttcatgtttttcaacccaaacaatgatacataatgaaaatgatcagatgatatgacccctctccttgtgcctatttttttaagtgtctgaaaagataggtttttagatttcttatctagtttgtctttcagatcaacgggaataagaaatatcctttctccatgtctacaatcaaatggaagaaaggaaggaaaggggaaaagagggtaggagggagaagggagggagggagtggggaaggaaggaaggaaggggtgaggaaggaaggaaagggaggaggaaggaaagggagggagagaaggaaggaaggaaggaaagggaagggaagggaagaaggaaagggggaaggaaggaaggaaagagggagggagggaaggaaggaagaaagaaaagaaggaaggaagttaagcaggcaggcacattcaagattcaagaagcaagaaaatgtcttatttcttgctgtgactcctgcggacagagcccggtggtgagcagctagctttggcttgttggcagatggcctagaacagttctctagaagtgtagaagtggaatatgtctagacctctaacagaagactggatcatcaaatcattcttatgatgtttaaatgcctgtagaacagtgagcagtcatatacacatgcacacagatatgcacacactccatgcctatgttcttagcttaaaactgaggatatgaagaagaagaagaagaaaaaacatacaacagatactccttgacttatgatggtgtcatgttccagtaaacccatcctaaattgaaaatatcattaagtcacaaatggtattttcaacttaggacgggtttacgtggatgtaaccccatgggaagtgaatgagcgtgctgaaagcattacaccatcataaggctgaaccatcctgaggcataccatagtaagtcagggaccatctatatagctattgttttaaggatgacataagattatctaggttctttttttttaaggatgaaggaattgaacaattgacaaagcttcatggggaatttttccctctcttttctgtaggtttttttttttaattggaattattccaatgcttgtcatttttggttgtcaaatatatgcaaataccaattttctgagctgagttacacttaatcatggaagccatttaattagaagttcacccagaaagctcactgaaatctccatgaagcactgactgttgaggaagagtgataattttgcttatgaggaataacttttctaatatatttgcgtttctacaaaaatatttatttatattgtgctatattccaaagacatttaaggtatcttggtaatttgtatgttttggggtaattttattcatccttaaactttgtcttagatgttttacatatagaattcttatataatgcttaaagcttaatacatggaaactctgaggttatttgggatttgagatttaatggagacagcaaatcaaatacaataaataaagggaaataacaggtgaagtgtttggcttttaacagtctctgctctttattcagattattgagtctcatgatctgctattaaccaaactaaatacatacccagttggcccacaattcttctttcaaaatgtagtatttgtatgcttagaacaaaggttagaattgtactcctagaggttaaattaatatcaaaatttccacgtgaattatttgttcagactttggtactttacaaagtatgtgttatgagagaaaagcaagaaatgtttctactttttctctgaaaaaagagctctcatgcacaatcatataaaattaattgagtctgataaattcatgttagagtagaaataaaaatatatgccatctaacaagttgaatgccagttattttcatttaaagtaattaaaattgtattttcagttgaagtgagaaactttaaattattctcagaaagcagcatatatacattgcaattgtagcagagatctcctttcccaagagtatttggattactattttatttttaaaacatattagctcctgcagtgttttataaatgcctctttatatcttcctcaacctttaaaactaagatgtccaatcatttatccactagtcatatttaactctttaaagttaagtagaaattaattaaaattaaacacaatttaaaattcacgtttcaagtgctcagttgtcataggtggctagtggctgtcatgctgtacagcacagatgtgtaacctttccttcactaaaagtgttgctgcaaagttttgcttagattcttcactttcttgaggacagagactgggttttcttcacctgggatttccagcttccctcgttgcattgggcaacattattcgtagccatgtgggctctagaaaccagctccactgcttacaggcaacctggggcacgtcgctgcatcgttctaggcttgattttctcttttataataaaattaatattttcctcacaaagttgctctaatgatatatgagataatctagggcataaaatgcagaacatagaaggagctctttatatactagctgttactgttgcttgtttaattattttgaaaatatagtaagtatctgttgaaagaacggttaagtgaatgacgttcctgttgcaatgtcactaagtccagaaatacctcccccccatacacagaatcctccaattttctataatgtttctcctttttttttttttttttctgaaatcaaccaaatctacagaaccttaaagaaaagaaaaaggtaattggggcagtggtaaaatgcaaagagaaagagtagtaatatttacaatattttggatgtttaaattcacattaaagttttataattccataaaagaaaattattgaaacactagagtagacattataaaataaatgttccctaagttcaaccatcagacagtcatttttaaggattttttaaaaaattcacaagcttctaaaaacatagtgtttcaatgccgtatgcacaatttcatattctggtcttctcactaaacttagtattcactaattctatcattataattttttatattattgagaagaatcatattcatagttagaatcagacacttaattccagatgctaggtatgattctagacactaaaactattatatcattaaatgagggcaacatactccaaaaatgaaatgtgagttttgagatagtcattttcttgtttttgaatatttagatcatttttagactttcagagaagggcattattaaggagaatttctaatctataaatgttaagagccagtaaccaacagagtccttttggattcattgtatgtttgaagccctaggaagcttccttgcctggataaaaaaagcagcaggcagtgacggaggtgtaggatgaggactggtctgctgtcaaattgcacaggaattagagcactgaattggaaagtctgatcttagagtacaaaaattaaatttgttaaaatcgaaaactgcctttgaatatatagttgaagcatatcccaaataaaacatctctatcccactaatatttcaatgatactactaagaattttttatgctgattaaattactgctgttcaaagtgtgacatttaaaacacctgtttagtgtgtttgttgtgtcgaaaatgtaaaaataacactttgatgtagagcatttatgagccatccatatgtgtgggtgtccatatggtattataaattttagaaagcatttctttcctattggagaaagagattcttcattaactcccaagggaccactcatttgatgactattgttcttttgccttagcataccggcgtttcctcaacgcacaattatgatgtactctattgattatagcagcaacgacctactcagaattaatctctgtctttctcttataactgtacagattcattaaatgtaaccaaccttccattttattgctaacattaaaatgtgtaaataacacaagtaaccacatttccaagggttatttttaactagatggtataatatccccttggaaattagctataatgttgaagtcaatattttttaaactgaactagcattgcttcaaatctaccaaacacatgtataaaaccgacaatgagacaggaaaaattgaaagctttatgagaaatatgtgactatcagaatttggaccatgaaaaattctataaagtttttcgatatcgcttttcctaaaaatacagttttcttgcctttcctaattattgttaaacagcattaaaaatttctctttctggctgtttaatatttctttaatgtttaagaacagaataaatgagtcagtccgggtgtggtggctcacgcctgtaatcccagcactttaggaggccgaggcggttagatcacctgaggccaggagttcgagaccagcctggccaacatggcaaaaccccatccctactaaaaatacaaaaattagctgtgtgtggtggtacacgcctgtaatcccagctcctcaggaggctgagacaggagaattgcttcaaccgagattgcgccaccgcactccagcctgcgtgacagagagagactgtaaaaaaaaagtcacctggaatactgcaagcacaggttccaatgctgcttttctctccttgtctttcgtttatcgattccttcctgcgtgccagttgcatcctagaacagatgagtaaggcacccttgctgctgtcaagaagcaaatgacagtgaagcaaagcttgacagtgtgtccgagatgcattttgagaggcgtgaacccggggtgttatgggagcaccttggtgggcacaagacccactgaggccagtcagcgacagtttccttcagaaaggtgactcctgagctaggtcctgaaaagcgggtgggatcttgcatgggcaaagctatgctggtgagagagggcacagaggtgtgaattggtctgtggggcttcttcagatgatatcccccagggatcccgtgaaagccatgacagcatccagttgatgttgagtgcattaggacaggatgaatcgaaatgggtagagatttgttaggtagaattgaggatgtggggggaaaggaggggaatgaaagtgggctgcaatgtgtggaacagcgaagggccacattatctggtatgcaggggaaagagtggggctactggaagcaaggctagaaggactgatttgttccattccagtgacagcaggaggagcatatgattagtgtggtggtcagtgaagagccattgaagagttttaataatgacacggttggagctctgcattagtaatgtgaatctgacaatggagtagaagctaagaaggtacaacaacataggggtatgcaccagtagaaccacagaaatgcagagaatgagaatggacaaagaagcaaggtttacaaagaaacctttgtctaacctggtaaagcgtcttccatctgtccctttagcttggtacggtatagttagggacaggtgcctcactgggaactttactttcattcaatgcagccagtgaacttagtacttttattcccattttacagatgggaaaactgaagagacagagaattattatatatcaaggacctaccgtttatcattagaaatttcaaatatttatctctattaatctacatagtaaccctttgaggctgatgttagaatccctacacagacagtccccaatatatgattatttgactttatgatggtgcaaaagtgatacacaatggttgaaaccatacttcaagtaccaatccaaccttgtttttcactttttgtacagtattcaataaattgcataagataatcaacacgttattataaaacttgtttcatgtcagattgttttgcccaacttcaaggcagagtaagtgttctgagcacatttaaggtaggctaggctaagctgtgatgttcggtgggttaggtgtattaaacgcatttttgacttatgatattttcaagttacaatgggcttattgggaggtaatcccattgtaagtcgaggagcctctatatatagttgaggatctgaggctccagcatatcaaacagtcatgcccacaataatttggataaggggatgcatgactccaaagctcatagtcatcaccagtgaattccatcctgtgttgcatgctggcatcacccagagaacctttaagaaacgccagtgcctattctcaaccccaaaccaattaaatcaggatatttgggatggagcccaatcatccacattctttgaaaagtcccctgtagattctaaagcacatatgtaactgagaaacgtggtactgctgagggaccctgaacaaccctctttatagctgagcagatgtgaagtatgatggaggaggaagcatagatcattgcaacgtttgagccctgggtgatgggaagaatcatttggatacagagaaagggatacagtcgggaagtcagaccagaggactggtcagaaatgaccggatgaggcacttttgggcttggtgtggtactgcacaggctcagggagatgaccatgaggcagctctaacctaggtggggaaccggaggacctgggtgtgcagattttctgcttatatttgacagtttgtaaagcccttgatttagatgagacctgtgggacaagactgtaaaaagggcacgaaacgaatcccagagtaaccagattcagcgggtgagataaagaagaaaaaccaagaaagctaattttcagggagtggataaaatctaaggtgaggtttaagtagagaacacaggtaaactgacgaaagatggcagcacgagtcagagtatgaggggaaattaggttagttagctgagcggatgaccaaaccagtggtggggtattttagtctgattcatggggggaaaatagtccaacagctggagagaatacaacctgagactgccttcatgcactcagcaagtatgtactgggagtgttccgtcttctagatgccacacaggctctgctttccatccctgaactaaacaaagatgcatgtcctcggccgggcgtggtggctaacacctgcaatcccagcactttgggaggccaaggctggtggatcacttgaggccaggagctcaagaccagcctggccaacatggtgaaaccctgtcttaactaaaaacacaaaaattagccaggtgtggtggtgcatgcctgtaatcctagattcgtgggaggctgaggcagcagattcacttgaacctggaaggtggaggttgcagtgagctgagattgtgccactgcactctagcctgagtgacagagcaagactctgtaaaaaaaaaaaaaaaaaaaaaaaaaaaaaaaaaaaaagagagagagagagagagagatgtgtgtcctcatgtggtttacattccagctggtagaaactgactagacacatacaaattatgtaaataggactttagtttcatatgctaaggttgtagaggggagataaagtacctaggattgagagaatggattggagaggcattacaatgtttattaaacaaggtggtggttggagatttccctgaaaagtcaacatgagagctaagcctggcagaggtgaggtgggaatcgtgtggctgtcagggaatcactctaatgctttgtatgattttggattttctatgtatacaatcttgtcatttggagtctttagtgctctgcatctttgccagccctggtgttatctggcctttattttatccattctaatgggcatgtagtgatacctggtcaggactttaacttatgtttcactaatgactagtgatgttgattgtctttccatgggcttatttgccatttatatatctcctttggcaaaatgtctgttttatcctttgtttgttttttgtttgttagagacaaggtcttgctctgtccattgccctggctggagtgatcatggctcactgtagcctcaaactcctaggctcaagaaatcctcctgcctcagcctcccatgtaactagaattacaggtgctaccatgcctggctaattttttaaaaattatttttgtagcaataggtctcactagtttgccaaggctggtctcaaactcctgtcctcaagctatcctcctgctttttatccatttttaaattgttttcttttttttttttttttactgttgaatcttcagaggttttcattgtttatatatttaaattctttggtaggtacatgatttgtacatattttcttccagcctacagttagtcttttaattcttttaatagtgcctcttgcagatcaaaattggtttattataataaaatacaatttatcaaattatttctatggctcatgcttttggtatcaggcctcagaattatttgcctaactccaggtcatgaagatttttctcctgtgttttcttttaacacttttacatgttttacattttacacttatatcttctaattattgttttattgtggtaaaatatacatagcctaaaattaccattttaaccacttcaaatgtacagttcagtggcactgagtaaattcacattgttggcaaccatcaccaccacccatctctagaacattttccatcttcccagactgacactcagtacccattagacaccaattcccctctcctccccctccccccattctctcatggtcaccatcctactttcttcctctatgcatttgactactccaaggaccttatataggtggaatcatacaatcatacctatttgacctttggtgactggcttatttcacttagcatagtctttaaggtccatttgtgtcataggctgggtcagaatttccctcttttcaaggctggacagtattccattgtatggatgggctgctgcagatccagtcattcatcagtgaacacttggcttgttgcttccaccttgcatttatttttgaagtcctaaaaatttatctttttacctaattttggtagaatttctcttctctcatcttccgatggcatttttactattatagaacctaatcttcttatgtgtctagcagtaaggcatttatattttttaagggatcatgaataactgaaaacatgaaatacatattcatttaaaatgattataaatatagatgactagatcattctgaaacagaaagccagaattaactgttgcaataaatcacaataagctaagtaaaagtgcagtagcatcattggtttggcactacttccgtggctggccctaagtgtatgcggcttgtcaaaaatatacttcccactggcgaccacatgaagtttctggatgcccgccattcaaattcccatagatttttttgggatacatgctatttataaataaaggtatttctgttcccataatatgtttgagacgtagaatgaacataatgacttgtaatgtctcttgaaatactaatttctaaatttatgtgaaatatatacacaacaaccatgtagcatcataattatttaccttggacagaatttggacgtattttgtgtattcaagccacattgatctatactagttaatacatatgcctaaatttttaattgattgtctggcattgattatgacactgaaaagaatatggttcaatgatttattattttgtaataggttaaatgtaaaaactacagatgatgtaactgaaaaatccatttcttatggttacttttaaatttatatgaattggttgtgccctaaataaaatgtttatcagcaattcatatctgaggtataaaaaatcagcaactttcattttacattattgttttacttattccaagaaattcaaagggagtgagagagtaactatgaggacatcacattctaatcactcacattttaatcacccacaaatgaggtcacacataatgggtcacacacaatggaaactgtgtttcaaaattgaaaggcatatcatctctgcttcaggctgagcatgctcctgtttaacccaaggaagaactctttcctgcacagtgagccaagtacagggacaggcagaagatcaagaagagtttgttgtgacattttcctactttggttatttcagttcctatcacctttcttaccatttagtgatcaacgtgtatatttacaggaatgatggactggcacaagactttcctaataaatctcaagggttgtttttctaactctataaaatgaagttgtctttcttagatatgctatatctatacagacaaacaaaataaaacaccaggcagtcagctgctacatactgaccatgtaaccagcctacataatttgaaatataaccttcattacaattccttttgggggtcccaaattggatcagatcttcatttcatatttctttggctagagtgtaataagaccaggtttgagaaaatgacacagtagactgcaatttcaaattccaaatgtccttatcctaaaacactacagggaagaatttctcaggaccaaaatgtcctctcagtaagaagttgcttttggtacaaatggaagtttaataagacagttggtcacctagtttgaatttcttatgttgtgctcacaggcaggaaacaaatgtttggtttggttttagttggacatatccttaaatttactccaggaaatggggaagttgtagcctccaacagctaaccccattacctgatatacatcaggtccctaatcagatctgaattgaggtgaccctgtgccctggaggaatactggtaagtaaacagggcaatgtaattgagtggagaagtgctgatgggaagttcagggtcttctatcagggccactgaagccaaactttggtgggagaaataattggactttcccaagaaaacaacatgcagctgaggcctaaagaataagtaggaattagccaggatcaaagaggttagaaggaaagttttccagaaatagagaacttctaataagaagaccccaaatcaaggtgaagtagggtatgttgaaggaattaagaggaattagtatagccaaggagagctggggaggtaaacgagggccaaacaggcactgcaattggaaaagaagatggaaaagatgttcaaagatggggaacatggtgtcctactagatggcatctagtagtgcagtgattaaagggcttataacagcaacaaaggtgggaaccaaaggaagacaaagcaggtcaaggaagattagaaatacccatgactgcagaccctgcaggccactaatagtgtccaacaaaggcttctaaagctctccaaccaattcaaagttgtagataatggacaggagggaaaaacaaaggattatgtaatttggaaatagttgaagtaactgcacatgttgaaagtgtacagtctgatacatgttgttgtatgtacacatcggtgaaaccaccctcaccatcaggacggtgaacttctctatcacccccaagagtttcctcatcctttgtaatcccttcctctgacacaaccctgtctttccccatccataggcaaccactgtgcttgttgtcaatgcagattactttgcatttcctgaaatttttattatataaatagaataatacaacctgtactcttattaggtctggctttttatactcagcctaattatattgagatacacggtattgagattatagattatattaaggttatccatgttgtaacttatcaatggaatagttcattcctttttattcattcttttggagacatttcacagtttgttatccgtttacctgttggtggacgtttgggtcattccactttggaactattaaaaataaaactgttatgactatttacaactttatgaacatatggtttaatttctattgggtaaatacttaggagtggaataactgggccatttggatagtgtatgtttctattttccaaagtggttgtaccattgtaccttcccactagcagtgaatcagggttccatttcctccacctcattctcaacacttgatatgcttcatgttttaaattttggttttattctaataggtgtggttttaatttgcattctcttaatgactaacgatgttgagcctcttttcatgtgctcatttgccacccttgtatcttcttttgtgaggcatccattcaactcttttgccactacttaattacacttttattattgagtttttagagtgatttctatactctagttacatgtcctttatcagatacatgaaaatattttctcccaaggtaaaggttgctgtttcagtcttttaatagtgtctttcaaagagcagatcttttcactttgatgaagtccagtttgtcagtttgttcttttatggatcatgcttttctcttctgttttctgctagaacttttatagtttagtgttttacctttatatctattattcattttgtgcaaatcagtgggaatcaaagtttatttgcatatgaatatcaaattatgttagcattacttgttaaatatactgttttctcctgacagaattgcctttgtacttctgtcaaaaaatcaattgtccatatatgtgaggttctatctatgaactctctatccttttgtcttgatctattctgtttgtaccaataccacattattctgataattgtacatttctaataagtcttaaaagcagatagtgttagttgttcagatttgtccttttaaaaaaacagtttacatattctaagtcatttgcccttccacataaactttagaatcagttgatcaatttctccaaattaggatttattctaactactgtggtttcttagacaaatttagactctaggcattatcctgaataaatatttgtttcaatggatgaataatttacctttgcttgacttgtatagtatttttatgtgttggtgttattttctccattgtaaattctccaatttgttgatctgtaaggcccattatcctactatatccttctggctacatgtagcctgtctgcatatttgtatttggtgtgattttttttgcatgttgttgacattttaaatatatagatctttaagtgtaacttgaagtttaggccattgttatttaattgattcactccttcaatctaatcacaatttaatttaattagtctcatattagaagcttttgttggattttgacccatgttgtatgttttataagtaagcatgtttctttactaaagtgttaggtgtgaaattatggcccattaatccaagacatgaaaagaaacacttggaaccttttataagggtaattgttgggagtaatgaatctataaatacagaattgagggaaaactaataaaaatgaaaaataaaaatgtaaaatggcctacatgaacatggaccctgacatttaaaaaattgttccacaattagaaaatgccagggattgattttcagtaattgtccctccttgatgtttaattaaagagtattttcaacttaaaggtcatggtgaattgagttttcctggataatggtcaatgacaatgtgtttgaaacagatattgaacttaccaatggcttacaagattagagaagagaggcagggagacattctaattctgctattcagtcctggggagagaaagaatactgttttacatactatcagttcagaggagcaaattaaccaacaacaaagataaagaacgttgagactagagactgaatttgttggactttatgagagggcaagcttacatttggaatattttattgtaggagcccaggttgtacaggggctgtgagtaaagagtgctcttactgaagcaacagcctgctagagcacagttgctacatagagaaagagatgccttcatctttgtagcttttcataggaagcacgtaattcacagcaaatattataatgtgtgcattccatgatatcattgtctttccttctctcctaaaagttagagattacaaatatcagctcttcaaattccacattaccagaggatgagtttcaagaaaggtgtcatcccaagtggagaatcacttatagtttccttatttcagatactatattatgatccactcatactttgctgctaagggactaacaggctacttcacacggagccacacagacagaaagtgcaggatccttgaaaagtttgtgtagtttaaatgaccctgaggtgctgccagatccagggaacactgagaacagggaagctacattatgtgcaatgaatactggctctgtgcatgtgatccaggcaatcaccatttcaatgaaagaatgtagggcttacatgttctctttagtttctgagtcatgcacagttctacctacaaaaaatcagcaaatcgggaagttggatgcttagtactgaggctgactgagcatgcaaatatcattttttacaataaaatcacaaagtagtagtgcatttgtgtgaatagcatgaattagctaaatttaacatacatattcctatctatggtgcttctgaaataatcttaacaataaataaaactttgtaagagggtagaattagatacttgaaatgcactgattgggttatatatgtctagatctacatctagactcacatgtatgcctgcatgatactgtgcaagctgttacagaaatagaaagaccaacgttagcctccaagttgaccactaaatatatgttattaccaatagccttgaaactttgcagaagaatttaggaatatccttagatttagatacgttcctcaactggacatctggcatgttgaaaacctgagggcatgaagtgaatggtctagtctacttttacactgtagtggggcatttaagtaaattacatggtacaaaacagagttcttccctttatttgttcagcagattttagttcagcagagtttagaaacttccaaatatcccgtccaaatattttaagtcataaaaatagggtgtcaaccctgaaaggacatttattcaggatcaaggccttgaagaatggggtctcttaactatgggaaaaaaatggttttccaaaattctataatgcttaccatttccaagccctttttatctactgattgtcatctgactctctgctagctatttaatatcttctctttcatgctgtatcctggactgggtcttgtgtcctatagcttcatcgctcttctaaggagagatgtatgtaatgctttggaataatgagagacgtatgtaatgcttggatgttctatgcagatatgagaatgcatggcctgtttttaaacacttcttcagcctctgtccgccacccagtccactatgtaatcagaaaagtatttctcatcgtctatttgcttaaaattgatcacgctatgatctaagctcactcttcctattttctattttatggaattgaaaaacacctcctcactcttttctctgtaaatgtcctgtgctctcatgattgactgtaccgtttccaactttctcttccagggttttgtccccattaatcctcaccctgtctctcatctttccctctagcagccgcttctatggaaagatctcagacttacaggaaaagacttctgctctacaaagatgtccttgccttctcagttgtctttaggttcctttcaaaatggttcagactcttcattttgtggagttaaggctcaaaatgcaacacttttgagtgaggttaccaggtaaacttgcattcactttgctggtgtaaataactgagatcaggcctttgctgagaacacatgtggatttgggaagacactgagtgcccaatagggtggttactagtacaccaagaagtgggcaaagagcaacaaaagtgttaggagcggaagaaccccatttacccctggactggacattattagatcaaaactgctttctctgtcatttgttcatcattatagaggaacctctctcatttcaggtagttgaaaacaattttcttggctcccggtatattctacctccatggttcttcctttgagcttttccattccttttgtagccagttgggggcagtgctaatcttctcaattctattgcccttaaccaaggcaggatataatcagtcattaggcaaaaccgtgtcctagtccacagtcctggggctggtagggatgtcagaggccacctgggttgacctgggagcctgtagcctgtgactacacagggattggcaggcttcaatgtagattggaattgcctggggaggtttttaagaaatgccgatgcctgggtcccaccgaggacaattaatgatgaggtctgggcatctgagtttagtgaatgcccaccaggagattctgatcccgcagtgagtgtcaagccacagttcgggacttctaagtactgggagcccccacttcacaaagctgccaattctgttttctacacagcacaactcagctgagaattcttccttagtttgcattgaaatctgtaactgtcatcctcatgttagcaaacagggagtctgtcacccatacggtccaggtgaaaaagtgggaactttaaccactgattccaagaagattcactatttgagaatccaaaaagggatttggacagttagatagatgtgcatccagttcttagtcaaaaccgagtattgggatgtaatggacatgatgtgattgtctggaatttcttatttaaggaaaggtgggaaattccatccttttctacagttaaaaattaaaaaaaaaatccatagtgacctttgcccaaataaagaggggtagggttatttcatagcagttataaattgcacactgtgtgcctaattgcttaaaaaaaaaccccaaagggtatttacgttatgtatattgtaccacaattcaaaatttaaaaggacaacattatgtgaagtgcatctgattggtattttactgttttgatttttttctagtcagactcagtatacagttgatccactatgatgggttacatcatagtccatggtcaaaatctttttttcttattattattactattaacaatctctaattcagtgctgtaaactatggatggaagaaataatctggtaaatgaaggatatcaaaagttctctgtaacctttgttgtgttgttgttaaatgcaaaggggctttcgtgtgtcaagcagcaacgtgctgatgcaggtctgattctaagtgctgtgttttagagaatgcttgaggtaacaccattcagagttttcttttctttttcctttctgtcttttgaggatgtccttcactgaagtacaaggacatttacaaggatttctaggcttctccatcactgcttagtgcctgtggccaatctatctgtgatatacggtaaatattttcccttgcaggaaaagggcttagagctatttctctgcattgattgagcacattagactaatatttatccatttgaaactttgggaattggccatacatcatttagtagctgtgcacccattatgaaaagtaattgtatattagtatttccaaaaatttacatctggggtagaaaacctgtcaatcacaaatgttttcgtgatgattacattggggaaaattagaattgctcatgataatgtggttgttaattttaaaagacatgtgacttttccaatattagaaagaaatgagagggtttctaatactttatttcaggatcattttgaaccccagagctatggcctccacaactcctattgctggtcataattgtatgtattgttcagcagagacacataattttgggtatctctttcctgagaattgaatataaaaaaagtgcccaaacttgccaactttcattccttggtccacctgtagtcaaccatcacctggctgggtgactaagtcacatacattttccccatgaaggaaatctgataagataaaacacccatactcctgtaaagaatggagggaaaaaaatacaccatgatttatttttagataaattaaaagacagaaaaaatctatctttcgaacaaagagatctatgttggtattgccctgtgtgccatttaaaatgacattatattggttttcagaaatatttagggctagtttttcttctatgttttataagctttttaaattatctcctttttatgtttatgtgtttttttaattctaaagacatctatttttatgatcagaaaaatatttttataatcagaaatatattgtgtttaaaatcaagaacccaaaattaccaggattgctaaattttatttaaaaatatgtggtaatatccatccacttttttcttttttttttttttttttgagacagagtctcactctgttgcccaggttagagtgcagtggtatgatctctgctcactgcaacctcagcctctcaggttcaagcaatcctcatgcctcagcctcccaagtagctgggattacaggtgtgcgctaccatgccagctaatttttgtgggggggttggttttgtttgttcgtttgtttgtttgttttgtttgtttttatagcagacacactttcaacatgttggccaggctggtctcaaattctcgacctcaaatgatccgcccccctcagcctcccagtgctgggattgcaggcgtaagccactgtgcccagcccacccacttttcctatagtagcttcttatctttttctaatcctatagtcattaagatgaaagcttttacttctaaaactgtatttacagtttcccatcacaaagatccccacgaagagcagaatggcaagctcacaaaaaaagactttaaattactgcctacttgttgtctttgaaatcattcaagttttcgaggtaaagagaagaacatgtgcttattttatcaaccaaaagcaatgacgtgctcagtggtcattagaatgggaattatactctgggggtttaattttacttttttgagtgtttctttaaaaacttagtaagaaggagttgggtttttactattttttttcctcttggtatataattttaaaactaaagttattctggttattatttcccttagagcacatatttccatcttaaagtagcgctcccacaacttgagcattcagagtagaggcaaatttggcgtcagtgtttgccatgcaaaacccacaccgatattcaagtttcgcctgcatctttatttccattttcccttatagagtgtaatctgttgacatggagagagaggcaaaacataagcagttggagagagataaaaattgagcacaaattcaggatagtccacaaatcggcaaactcagaaaacattgtattcaaagtgtgtgatgacagtgtcatcacagtttctgtctttgctgtttgcccactcgctaagtcttatttgtaaccccaaaatcagtattccagacgcctttaagatcttcatcgacatttgcagagcaacaaagtttgactcacccaacactcttgctgtctgctgtggatgaaagagcaatgctctgccttcttgtttcagctctcatgctatgaacaaggatgtccttttcatggcctatttagtaccgtggtttttacatttttgtgctttttgttggtgatcttactgtttaaaatgccccccaagcatagtgctgtctagtattcctaagtgcaagaaggctatgatgtgccttgtggagaaaatacatgtgttagagaagcctttttcagcatgagcagataacctagacaggctccagataatctctattcaaaaacagagatgcagaaagtcctattccccatgttaagtagattctccttcctagatatttgttaggctttcagccccagcacttcttgatccccaattttagaaaaagtcttggaaagcagaacttatgggttagagatatagtaaaagtagaactgaacctgccatgaagcctggcaaacccgggtgagagctgcctgcaggggccttgcttcggaagaaaagattagacccaagaggctgtttttccaggcactgaactcaggaagtgagaggttagggttgaagcctacaaaagatccaactggtagactgcagtatgtggaagagatggaggtttctaaagcagtatgttaaggctctctggagaaacagaaccaataggaaagatagatggattgaggaataggtggatagatggatagataggaataggataggggtgggtggatggatggatggatggatggatggatggatggaaaggaaaggaggacggatggatggacggatggttggatggatggatggatggatggatggatggatggatggatggatggattgttcaatcgatcgatacacagatagatagattaatagaaatttattatgagaaattggttcttgcgtttatggaggctgaaaagtcccacaatctgccatctgcaagctggagtcatacgaaagctgctgatgccgtttgaaggcctgggagctggagagccaatggtgtgcattccagtcagagtctgaggcctaagaactaggagtgctgagggcaggagaggattgatgtcccagctcaagaggtcaggcggagggaaaattcagagttcctctgcctttttgttctgttcgggtccttagtgatgggatgctgcccatccattctggggaggccatctgcttttctcaactcaaatgctaatccagaaacaccctcacggacacaaccagaaataatgtttagccagatatctgggcatcccatgattttgtcaagtggatgtataaaattaaccatcacaggaagttaacagtgagtcaggttagaaggctctttaagtccaagccattccagcatcttccagattcttcctcttgtaaggactctgggatgtgtccataatggagctcagcctgctgacattagaggaaagttccaattcaaactctgtgtctgtgggattgtaaatccctgctgtcctttacacaccaaactctcaatggccagagtgtaaggagggtgcgcagcagtgccttccattgccaggacagccctgactgaatggaaaggcaaagacaagacagtaaaaagtctggtagagagagtgggggactcacaccaaggcacagagtggtgtctccctataatgacctcatgttttaggatccaccttacagtgtaatcactggtggcatggggaagttagagcatggaatttccatcttcagctgcaaaatttatttttcttaatcatttaattctaaattaaattttaaaattctggccagctgcggtgtgtcatgtctgtaatcccagcactttgggaggccgaggcgggcgtgtatcccttgaggtcaggagctcgagaccagcctggccaacatggtgaaatcccatctctactaaaaatacaaaattagccaggtgtggtggcacctgtatgtaatcccagctacttgggcagttgaggtaggagaatcacttgaacctgggaggcagaggttgcagtgagccaagatcgcgccactgtactccagcctgggcaaaaacagcaaaactcttgtctcaaaaaaaaaaatttttctttatagaatgactttcacattttaaagaaccctcggataaatgattaagctgggcgtgaaaactgtttatgtctaaagaggacatctagcatggaaacccctagaaatgcattggccagggacactcagggcatgctggcatgggaagcaagatgcgcccactgttcccaatgacccagcgatttcttggcatggaaaataatcacttttattttaaaaggttttgacagtccctacagggtgctgaacagtctagaaattcataaatttgaccttttccttcagaatgattatataactaaaatggctaagctaaggcaaaattgtgtgtgttaaggttaatcattagaaaataaaagtgttagcaatagaacgaggtggcatatggaatatgacagaagctgttgattaaacctgatatgaaaacaataacttttaggccagccttgagggaaccgggatctgggttcactttgtgtgtgtgtgtgtgtgtgtgtgtgtgtgtgtgtgtgtgtgtgtgtgtacaatttaattctctctttgatgcaagcaaacaacaaggcaaaacttgaacacacagtgaatgtactttagggattgccaggagactatgaattaaatagaagaaatcagggagtgctatattaaatttctctttgactgagaacagattatcttcataggctttgcactcaaagaaataaagttggaaggcaataagcttccagtttcccttggtgatctcagtcagctctgcagactaacctctgaatgaattggcaatcatttctcggaagcagaggttgaaatttctgtgtttccttccatgtccacgtcaaggacaatattgagccttgggccacacaagggcagctgttgtctgttgggatgcccttgcttcagaacaaggtgcaccagacaaagagacccacagcccacctcagcccatggaccttcactgagtggtgaacaagagcaaaaaggtgggcttgtcattcccttctttattgcctgtttcactaacacaaatgtaaattccttgagtgtaggtgtgtctgactagttgctgttgtatttgcgccgctatactagtacctggccatcacaggcattccacaaagactcactagaagaaaagtcccatggaaacaagagcaatcatgtttttagtagcagcaaatttgaagttcataaaggaatgaaatttatgttttaaaaatgcaatagtctttttatgtaaaagtcttgataagcctagagtttaggacagctttttaatggaacccgttgctaggaatgtccaaacatgagagcataggctcttccccatgttttgggagcccagaatactccctttggtcctgttgcatgctatccacagggaaaggagaaagtcactatgctgccacttcttccggaacagccaaaaggacgactttcccatgatggtcctggcactgggggtgaaaatgacctagccattcactaagtccccactgatggtatttattcatcatttgcagttggtttgtgtctccttcacttaagatccagtctaattcacggaaaagcaatgcagcttaaataagaagatgagttggaagtgacaagaaggctggtttgggagcagagtgttgaattgcagggttgagaattgcgggggaggttgaaagactgacgagggaaggaaataaaattcattctgtgtggattggagatatggaatgaaaagaaaaaaacaaaactaaagaggtagcagggaacctaaggaaagtatgttgggaaacaatttcttattacaattttacctttaacattcttcaaattaagtaagtaattaaagcagagtgtactgcagctgtgtcaaggtttccatttgaaaggacagacacaacaggatatgactctaaagacaggaaaacatgtttaatatatttttaatagatatatcttggcccggcgcggtggctcaaacctgtaatcccagcactttgagaggctgaggcaggcggatcatcaggtctagcagttcgagaccagcctggccaatatggtgacaccccgtctctattaaaaatacaaaaattagccgggcgtggtggttcgcgcctgcagtcccagctactcaggaagctgaggcagaaaaattgcttgaacccaggaggcagaggttgcagtgagccgagatggtgccactgcactccagcctgggtgacagagactctatctcaaaacatacatttttttttaatttaaaaaaaaagatatatcttattttgttaatgttgtattctttttttttttttttttttttttttttgagatggagtctctctctgtctcccaggctggaatgcagtggtgcgatctcggctcactgcaacctccacctccctggttcaagcaattcccctgtctcagcctcccgagtagctgggattacaggcacatgccaccaagcctggccaatttttttgtatttttagtagagacagagtttcaccatgttggccagactagtctcgaactcctgacctcaggcagtctgcccgccttggcctcccaaagtgctgggattacaggcatgagccaccgtgactggccagtgttgtattctttaaaaaagaggattgtccattccatttctactacccaaacatgacttcttgattctattccattcaatggaacactttttcattctctataaagtgcacagcaaggaagaagctataagaaaccttctctgtcttcagtgagtttactttgtcctggaggaaactagccagtaacaaacaactccagctccaaggtcaggcgtggttcctggtactgtagggatgtgtgcagtgtggggccatggaggcacgcccttgtggggaatggagaaagtttcctaaggagatggctgtggtttgctttgaatagggagtctgggctaagtgtgtttgaagtcaaaggaacaaaactagcaaagatacgaaggcagacattccagggtcctctcggagaatataattcctaactcactggagccctgtgtatggataggaagtagtttgaaagaagctggaaaatcttggcaacagactctggggatgtttaattcaaatctaaggagtatgaaatttattccgtagatcatggtaagccactgggtagattggacccataataacaaaacttaataatattttttctgtgatttatggtttttaatatttactaagtgtcaacaaagtgtgaagatttataagagcattatagtgtgtatgtaatttttacgcaaagggtttattggttgatctatgtagataagtaggatgtaaacatatgggaagaatgaggggaaagtcagatgttctgtatcatgccacccacaccatttaccctagccattgacatcacctggagagctatgaaagtattgctgaaatcccaccaagtgctctaggcatccacttataaaaatggagaaccatggctgaaaggtggcattgataattaaatgctaatgacctgaactcaggaacttcaaagctgatctcaaacttcttatgctctcaaatttactattttctacaaaatcatgaccagtcaacaatttacccactcttttttttttttttttttgctgttttctactttttactttttatgagtgtgcagtatttttgtcattaaatttaaaaacattgtaaaataatgcttatatttacataagtcactagaagcaaaacccatcggtgatttggaaacatatgatgagccacaggcctgggaccggggtgaggttgctgaggcattggcctggagtacaaaatttaagggggtatcagaaacctcagtgatgaagagaagtaatatatgtattttaagaccttaatttgttacagcagttttgggttcacagcaaagttgagaggaaggtacagagataccccatataccctttgccctcatatccatcatacatgtgtagtctttcccattattagagtccctcgccagtggtatacatcaggggtccccagcccctgagcctcaggctcgtacttggctgtgacctgttaggaaccgggctgcacaattactgcctgagctccaaacactcttttaaatcaatatttaatcgttaggtttttgcactatatagaaagagagaaaccatactagggcccctcatatgtgtaaatttgagcatgataatcacatactcatgacctgttagatgtctgaaaagggcttagccagtgggtcattactaataagaaaacactatctatcaagttttcaagctggggttgaaaataacgtttcttagttgttcagcaggagcagtgcatcctgttggatctgattctggagaaatcatgcgatgggtctcaagtttcttgcaaggcactagggtcatctggtacatgtgagcagaacgtttgtggccgatgagaatttgcacaatcctttctatgcagatcattccagacagggaggagggcagactaacagatgaagtagaaaaaactgccgagcaagagtactggcaaacctgtcaaaatttaaagccttaaaagaattaaaaaatttaaaaaatgaatatttttacattagaacatagaatagaaatattctgtagaagtattcgatgttctaataggaaaaaaaagagtttttcagttgtttccaatagtcaatgatatcatgttaaccaccagtcttgaggacaaactgatttcaagttccaaagctttctgatccctcatctaggaattttaacacaactgctgatgaaatagatggagatgtggtgtaagagatgcatggcctctcctgttctgaaaagaaattcacttctcagttgtttaatgatgctttgaaatctgtaaaatgctgcacaggaatgtttttttttttttccttttaaaaaagcactttctatgacctaaaatatagactttagtgaaataattgttgttttatcattgtaactcttatttgttaaattatctcattttaaaatatgctttaaaactatagatatttacatgtgtctttagaatggtcattatttccaggtcatttctctatacattttctaaatagtggacattttttccctctaataggtgataacagattttattggtgttggaataattagatattatacaaagctttagatataacgtgaatatacttaatttttcttcacttctatcatgtgacataaatttcttagtcaattggggagaaaggctgaatagtgggcagtgattgataggagccaatacatggattttcctcttattaaatatttttttgagattgggcacggtgggtaactcacacgtgtaatcccagcactttgagaggccaaggtgggaggattgcttgagaccagcctgggcaacatggtaagaccctcatctctacaaaaaaaagttgtaataataaataaatttttttaacagccttaaaatgaaaattttttttaaataaatttttttgaaaaatgttttctccaagcagacatgatttgtaaacaatcttagaccactttcaagaataactgtccaacatctttcatctgacatcttatttctttaaaatgagaaacattttaattattttgaatatatctttttaaaatacttagaatatattcacatctttacatttaaatgtgggtgtttccatgctaagattaaaatccaccttctcccttttaccctttgttttatgcagataattcagggatatgaaatttaagtgaagaatttgtgtcacctttgtcagtttttaaatttcagagccctatattctctcatttaaatcatggcagctgtcttctcgctggtgtttttgctgtggctctttgtccacatcaatccttctgtgccactgctatccctgtcttataatgcccgtctcaccacaccccaacagcctgcctacagctatcaatatggccatggtcacagcagtaagccttcttcaatttcaggagtccttagagtatgttttccatgtacccaaggacagattcactccagttcgccccacaccaccctgccaagcagcacaggtgctcctgtcaggtctgacttacaagcgttcaggtgctgccctgtcaagcgctatgggtgcaggtgatgtcagagctgctggagccacctggagctctgagctgaggggagaggaaagggattgagagaaagaggcaatggtcttcccctttgttcgtcttctgttaaaggagtcccagagatgcctagctcttgccacttgttttacaattagaatggaaattgcttctcagacttttggctaagatcgagtgcagattagaatgaaatgattcttccccattttgacactccagtcctcttttcccaggacccagacgcgtctgggaaactggaacaagagagactgagttgcaatcagtgggctgctgtcagcatcccgacccttctctgcaggtgaaagctttattgctgagtcaacaccagggaagccgtccttcttccttcccttctgcctcctcataggcccaaaggacctgctctactacgatgtcagatttcactcagcttgggcccttgccagatgagtaaagggcacgtaggtcgtgccatgcatgctcctccctaaaaactgctgctgctccttgttgcttttaggataaaagaaaaatgtgaggagccctcaccaccgccaggcagaaaacacctgtatcttacagttgtcctttccgtgagctgcccagcagccttgccgggagacagtgcagtctccattgggccaccgaggtaactgaggctcaaagcagctcagggctttgctgggggattggggtgcatccaggcatctgctcaccctctactgtgtggtgcagggatggttcttcatgctgtggccatgttctgctcctctcgcctggcttcccaccaggcctcgcgtcttgcagagcggccctctgctccctcccatgttgccaagtgtttccgaatgaaaggctgagaaaccacagaagacaaaagagaagctgtttgtttcacctccagggcccttctcctgaacgcagtgcctgagaatgccccccatctttctccacccaacccccttgcactctaccctcaagagcctgctccccgcagcccctccacaggaggcctttccccagctccgatctcactcctgcctctgcccagggtagtcttgttcctcagtcctcacaatgcaccctaaccatttctgtacatgttttggtgagttcaaaatttaaaccacaaacttaaatgtgcaagaaatgccatacttctttagtttcttaaaatcaaattaaatctgactcttggctgaccagcaaattccatctcagcattcccggctctcttttcctccccggcatcacccaagcctcagggaggcctctatggaatccgaaaaatctctggatgttgcccttttccacacctgtgtgttcccaagtggttgctccactgctgccatgcccagtggagctgcctcgtggggcccattgggcagccctccctgtggacacctggccacctcccatgggggcttccagggagctgagcccagtgcgtgcagagcgctggtcctttcttcctcttttggtatctgccgtctttaccctgtcctctctcttctcctcacagccactcgtccctgactctctctttcctctcaggagtccaggagacttggggaactgcggctttcacagaacccaggaggcggtccctggtctatctgcaggagccctttgctcttggcattgcagacgtcctctgcacaggtacaaagggctctatgccctttggcatgaagaacgagaacttcaggtgaacacagtgtgacttagtacattatctggccacacatatctgcctaccccttgggactgtgagctccaaagggcagcggcaggtcctgaccacagctgtgtcatcggccatgcactgtctgacacagggtcctccagtgagtgtgtggccagcaaaagctccagcgccacttgagctgcccatcagaaccaggagcgaagccacctggcgtcaaagcacagtgtggataatggctccctgcaagtctcattttcaaataaatacagaaatgagcattgtaggaaatcagatgctattttaaatttattgttacttgtaaccattgaaatgaagtatttctggatcaatacttccaaagacaatcaggagaaaaaaaaaaaagatttacttggactctttaaaaagagttgcaattggaaaaaggtaaaaatgataacttaagttatttttcctgatcaagtattttctagagatcatgagaagaaattccaaataatatttagttgctgacaaaaatacgtcttttgcattttggccacaaaagcatacccatctttaaaaacctattaacaaggctgggtgcagtcgcttaggcctgtaatcccagcactttgggaggcacaggtgggcaggtcagttgaggtcaggagttcaagatcagcctggccaacatggcaaaaaccctgtctctactcaaaatacaaaaattcactgggcgtggtggcaggtgcctgtaattccagctactggggaggctgaggcaggagaatcacttgagcccaggcggtagaggttacagtgagcagagactgtgccactgcactctagcctgggcaacagagcaagactctgtctcaaaaaataaaaaatttaaaaaattttaaaaactcaaaaacctattaccagacatgaatcacattgcttttcaattctgccctttttccactttgtgactttttgcagttgtattaaagtctttgatttagttttatacatttccacaagtaagctgcttagtacctttccatgttgttttaggaaaagaaaaaaaaaaaaaaatatatatatatatatatatatatatatatatatatatatatatatatatgtatttcaggatgttttcagagcccaagcattgttggccagacacctgcagtggcaaacagagacaggcttgtttctgccccctgagatgaagtaagtcttctcaaaaggtggctctcctttgcactctaatctaatgacaactaagattttaaattagcacatgccattttaatactgactgtaacattcagcagcatgctcattgcattaatcaaaatgttaccttattccatccgtgaagggcacccctcatttaggccactactcaaatggacgctcgaggacggcctcagaactcggccattcacaggatgtcaccaccacacgctgccccgtactgcaaggattcacaattgctttggataatagtccatatggagatatttatttgtttattaaggcgtgttaacctagctagcaattggaaaatagaattgttctgcagatttatgtcctgtaggttaccgagtcagcctaattcatcacaaataccaagtgctctaattaaggagaaagggggaaatgttccttcacatcctttatgatgtgttgtgcatttccatctcttgatcgaaaagtttatttagaatagcacaatgaatcctagtgtctttgcccagcaacaaggccaattgtactggaattgtcccacttaaaaatggctggctctggccagggcacggtggctcatgcctgtaatcccagcactttgggacgctgaggcgggcagatcatgaggtcaggagatcgagaccatcctggctaacacggtgaaaccccgtctctactaaaaataaaaaaaaggtagccaggctggtggcaggcgcctgtagtcccagctcctgggggggctgaggcaggagaatggtgttaacccaggaggcggagcttgcagtgagctgagatcgtgccactgcactccagcctgggtgacagagtgagactccatctcaaaaaaaaaaaaaaaaaaaaaaaaaaaaaaagctggctctgaactgaaaacattttttctttaaatcctgtttcttaaaaaaaaaaaaggggggggggtggttctattataaaccaaaggtacctattattaaaacttgcttccccattttccagtacttttgtactgtctagagatgtctaggttggtgtttaaaaaaaaaaaaaaaaaaaaaaagacttgaaactccagcttgccaagaaagagcccaagcgggaagtaccttccgaggctgtggtggagggagggaggcctaactaggacattcccagtccttgttgccagagtgtggggttcctcccgagtgtggctcaggggtcagaggcgcgctgtcccaggtgtttccagcctagctcagtggcctgaagcagaccctcccaggatttcttccaggccagtcttgcaggcgtctttagcagccccaggatacagcctccctggaatgtactggctttgaaagataaaacactgtatctctgcagtattagtcctataggcaccgaagctgcagtagctactcagaatcacatctgccaggcccaaacccatcacttggcgatgctcctgaaatctctgtcctctattcaagctagaagttgagtgaagggtgactgctcatgatgtgccgctgtggcatcagacactctcatctggagctgtgctggttggcataatctatttatactatgtttagagacatgtgcacctgcacacacatgcatgtgcgtgtgtgtgtctgtccttccctcaaatagctcaattcacttctcctgggggtcaccaataagcatcgtgaaatgggtgtgttttttctttatttgttgccatgcctgaaaattaatttttaaaaataaaatcaggcacctaggctgggcacagcggctcatgcctgtaatctccgcactttgggaggccaaggtgcgtggattgcctgagctcaggagttcaagactagcctgggcaatgtggtgaaaccccatctctattaaaaatacaaaaaaattagccaggcatggtggtgcacacctgtaaccccagctactcgggaggttgaggcaggagaattgcttgaacccgggaggtgcagtgagctgagattgtgctgctgcactccagtctgggtgagagagcaagactctgtctcaaaaaaaaaaaaaaaaaaaaatcaggcaccaaaataagagtggaatttaaaggttttttgcttaaataaatgccagaattgatatatgacctgtatttataaccaaggatacatgaccatttctgataactttttatgctcttaatttgtggtaagagctttacacttattatcttatttcatgtttacatccactttgttaataccattattacacttgtccccattgtatagaagaaaatgaagagcctcagagaaattaaggaattttccaattctcatacagctaggaatggtaaagccagaattagagccaggatcttatgggcctgtggttcaccaaaaaaaaaaaaaaaaaaaaaaaaaaaaaaaagtgattcagtattgttattaccataaaatctcagataaattgtgttctaagcccaaataaatgtcttttatttcttgactcttactttaaagagtaagagtattttaaaaacaaaataccattcaaaatagagcttttctactttttgccatttaaagcaaataatttgcatttcatggtgaggttaaggttatctagacagtctgaaaaccatcatccttgactatttacaaaatagccaacactcctggaggcagttcttaaaagattttttgcccagttcacttcagtacaactgaaaatttgagtccatgagtagctggtttcacctctataacatattattcttgtttactggttatttgtgagtcacagtgaaggagaagttttcattttcttttagaaacactgattcaagtcaagcaccttaatgttagtcaagcttgagatttggtaataacatctcactttctccacttagtgtcctgaggttgatgcttgccattgagaaattttttaaaatttcaacctcaggatcataaacactgtgttcaaatttcagtgtgctatttggcgtcagtcatagaagttcccatccaccagtgcagtgtgtgtgctgccgaggtgagcaccagctgccagcatagaaggcacccttgctccgtctacctcattgggaggtcacagcagtgctggcttcgtgctaccacttcacagacaaggaaaccaaggcttgcagcagtcagtggtttaccttgggctgcatggcaacggagaagccgacactcagttctagctcatcagagtccgcatttctatttgtgatatcatacagtgtcatgtgacatcatgtgataccatgcaaggcatcagtgagtaactgcatctctcgcaatgccacttcccccatcttcacccccctcaccaaacacttctccaaggctaagatttcattgtagagaactattgattctcttctatatcactcctacttttccagatcggaaaatagataatccacttgtatcacccctgtttcctggataactcacctagaaatggtctaatctgtttacatctttttatccaggtgaaaatgccttagtgaaaggcatctggggcattttatgacttggaaaatcacaagaattgatgtaaaatagagcagaggagccaaagcaaatatatattcattaagggctatttgcaattatagtgagctgagtggttttgtgcattctccttgaacatgatgaaagaccgcagattactctagcatcattgcagacaaagctacttaaactactaattacaccaccaaggagctgtttttttctcatccctgtagtctgacagagccaactttttttctcagaatgttattccctgcttgtgtctcaccctgtccttcagaattcaatcagcatgtctcacagcagcaccctacatgaaaccagattgctggaaagtccccaaaacaggccagcctttgactaggcctgccaatctaaggcaagggtctgcaggcttttcctgcagagagccagataatattatgtattttggattttgcaggccatagggtctctgtcccagctactcaaccacgctgtcgcagcacaaaaggagccctagacagtccatgaacgaatgagtgaggctgctgagttccaatcagactttacttacagacactgacatttgaattttatattattttctgtcatcatgaaatagtattctttgaaattttttcccaaccatttgaaaaagtaaaaaccattcttagatcagagccagtttgctgacctgagctccaaggcattttagctggctaggaaatggctgggctaggaactgctgcaggagctttctttaccttgaatcattgatctattgaactccagatcagattatgcaaattaatgtagtgggtccctgattaaaagagactcaagaactccttgttggagagacattgttagatagcactacatcctacttctcttgggtggccaagtacgaacccaggccagcatctctccttcatggcccacagtttctagtggcaccagagtgcagccaggggctgcaggcttggaagatcctggagtgaaagagaggacaggaattgtttaggaatcgtagtcactgccgagtactacccatttaggactcagagtgcctctcagaggtcacataattcaggaaactggaaggaaaagataactcaagacttaagcagagctcttgctacatgtgacctgaagcagcctcacctgagtgctgcaaacactatttacatttcaaatgcattttcaaatttacttttatggctactctcagaggtgtttttaatacatgtaaagcacaatcttcacaaaaagccttccgcaggaactgtaaaaaatattttatgtctttatttctaaaagtcctttgtaattccttgaggaccttcttgtgaggaatatagactacaggtcatgatgtaaaggaagaaataagtggaatagtaggttaggatgtatgagctggggaatataatgaggagaaaaagacaaaacggcatagtaagcagcaagagagcatataacaggttgacaaggagatgaagaagattcattcttgctgctcacaccactgcccgtgaactcagatgccgacacccccagaagtaaaatacagcatcacagttgtctttgcgtttttatcagacagagttattaaattgcctgtttcataacacaggtgattatcctctctataaatgctgcattttattatcattataaaggatgcatttgttgtttctctgcaaggatacaagcgctcctctctatgtttccatggagactacaccaggatctagtactgggcactcagacatgataccttatgtgaccgtagttagtcggtgatcttcaactaccgcagcccagggagggaatctgttgtacatttcctctgaggttgtaggccacaagtctttccaaatactggggagttgggtttcaatttaaataaaatggttattgagcaccagctatatttatgcattgtgctcagttctggggattaaaaggtaatagagacacggcttctattcttcagggatgtatgactccaggggaaaagaatgcctggagaatgaaaccagagcaagcccttgtgtaagtttccaactgtatctgtcttcttgctaaggcaaaagtcactggaggtgtatgacacccagagctaatcaatagcaagccctgggcaaaatacggtgactgtcaagaggcttgcccacaaggggctccttggcgctgcctccttcctacccttgactcttcatcatcccagtagacactagccccagagggcagctgtgcagagaccaactcttctacttgtacatcaaccaaagacaatagaacagagctgtgactttagaaatacatattttatttgatcagagctgagatgtcacagattatatgatgtatcttttttgtgtattcctctaagaaggaaaaaatagcatcagttctgatcataaatgtcagtgttagggtgatgggtacattagaagcccaacccccacaattacgcatgtaatatccatgaaacaaacaagcacgtgtacctcctgaatctaaaatttaaatttttaaaaaattatagttctaagatgctgtcaattgtatgatacattgtgatttcagggatgttaaaatgtgggaaaaatgtgcattttaaaataaaggaaacataatcattattggagtaaatccttgaacagccaccaactgtggttaacctaatagagactataggagcagtaatgataatgcagatgagtgtggtaatttaaaatttacagagcaatttatttaaatttatttatttgagatactagattaaaaataaaacaattatacagcaaagccatcctttgacagccagtctactatgttgacagctgataagccttcagttcatacttaggatacttcatgatattatatgatcttgtggttcttctttaactcccagcccagaactcagtctaaacgttgtgattccctggggcttagtcttagaccccttctccccctttgtttcttttttcccagtctgtattccctccgtaggtagtcttatccttgcatcattgacttaaatactcaccatatgctgataattccaaaatgtatagctttagctccaactttacccttgatccccaaaattaaacctctagctgccaccctgacttccccatagttcctaatggtgtctcctgcttcataatgccaaatatgaatgtgtgatccttcttttgcttcagtcatcatcacctccataaatggacacaagcatcatctccaagttatcttgactcctctcttgctctcacaccacacatgctacctacccatcagcaaatcctgcagacaattccttcaaaacaccttccacaatctgaccatggcttggaccgtggcccaagccaccatgggctgtttcctggattactgcaacagcccccagctgatcttccacctccccacttctctgctgcttctccttccagcctggtctccaaacagatgccagagcagtcattttaaaattgaagtcaaataacgtcccaactctgctcagactccaatggcttctcagctcccttggaataagccaaagtagttaaaatgggtgcctggccaatgtgccctggcccctgctgagtcactgccatcctttcaagcctttctctcaaacctcaatctgcttcccgtcagggtcttgctcccttgttccttctgcctggaaccctttcccagtttccagaaggctcacacctgacttcatttaggtctctgctgaaaagcaactttatcatcagtggtcttctctgaggacttgcctccttctccaggcattcccagcccccaccccgcacacttatccccatgggacttgggtttccatgtttgtctcctgcggtgtgcatggtgggctctgtcttgccttcttggatgagtgtgtgtgagggtggagaccatctccctacgattcactctctatccctagtcctcaggggagtgccgggccgagtggacagcattccagaagtgtgttctgcacgggtgattatgaagttatgtggctggattcactgtgtggttcatcagtcctgttgctttatagttatgaaggatctcatcagtgctggccgagatccttttcggttgtgcatgttccattgatactgtcatttgatgcctggtgggtaggaaattcatagaaaacactttataataatttcaattttggatgattctagaataggtcagagactcaagagttcttgtgaaataaattgctcatagtttagtacaggaaaggccttatttcatcgtattttaaatttttgttttgttttgttttgtgtaatggagtcttgctctgtcacccaggctggagtgcagtggtgtgatctcggcttactgcaacctccacctcccgggttcaagtgattctcctgtctcaccttcccaaatagctgggattacagacatctgccaccacacccagctaatttttgtatttttcatagagacgggttttcaccatgttgtccaggctggtctcgaactcctgacctcaggtgatccactggctttggcctgccaaagtgttgggattacagacatgagccactgcacccagccatattttaaattttaagttgagaatatgctgggatatctttaagattaatattagaataccatatcatagttcagtgaaaagcttgttaaaatgaataagaaataaatctctacattatttatagttattaaaattgtgtttagacatttacatgggcataaagttttattatctagcattcacatttttttaagttgacatatggtgaattaatggtgttcagggtttggggttttattttcctatcagaattacaatacaatttatacatttagtatctacacgttatctgcatctcctgtcttttgttggaaatcagactgtgctgcctagagtttagggtggtccattgttactcatataacctgcaggtcgaataatttattagtgtggttgatttgtcttcaagagttaccaagaaagttgaactcagcttggcatgacatatcattgctgcttaaacaaaggaagtgtgtggaccgctccaagcaagagtgaactctatcgagttcatgagatttcactgcagtttccagaagcgtcggctaccactgtggagcagcagaactttatattagtctgtactaaatctgactgagaccaaaaaatgtgtctagaataaaaccctcgaaaatgataacaaacagaggacaagacaaccaagggactgggtaataacattaagtgatgaacacagcgttgtttattctggtcaacattacattttgtctcttctcttttcagtttatgattacatgctctggaaagaaaaaacaatgatatacaaaacgataatcttttaatacagtctctgaaggaccatgcttgctttatgactttgctctttccactagtcttcacttttattggccggccagttcatgtcccccatccagattactcaaattacaaacaggggaggaactacggtagcccgtcagtcatactgtggaatattgaaaatgtcacatccatccagcatcacacttaatttattgatatatggagcattaaaatgttgaatactccgactcatagcctggatgataacagaataaagaagctccatgccgcggatgtgtaccccagaaggtgacaatgcagccggttgcagtggggggtctgagcccgtcttatttcagtgtgaggtgctgtagcctctgttaccatgacatgaggttcctgggacgcatgtaccattcagactgtcacgtcagcctcactgccaacactaagaaggaggtgcactgctgcctattcttagagatgtgttgaaaatgcagcagaatctcttggtttattatgtttctgagagcaagacacaagcccctccccatgcaggtatcccatctgcgcccgggctcagagagtcctgctcacagaattagattttagattcatgttgtcaggagccaaattgcattattttttagtgcttgagggaaaaaaacaaacatgaagaaaacacacgaaaaaacacttcatttcctgttatgggtcgaattatgtcccccaaaaagataatgttgaagtgctaatccccaacacccatgaatgtgcctttatttggaaatagagtctgtgcaggtgtaatcagggtaagataaggtcatactggatttggtgggtcaaaattcaatgtgactggtgggttttgtttgtttgtttgtttgtttttgagacagagtctcgctctgttgctaggctggagtgcagtggcattatttcagctcactgcaagctctgcctcccgggttcatgccattctcctgcctcagcctcccgagtagctgggacaacaggcacccgccaccacgcccggctaattttttgtattttttagtagagacggggtttcactatgttagccaggatggtctcgatctcctgacctcatgatccacccgcctcggcctcccaaagtgctgggattacaggcgtgagccactgcgcccagcttgactggtgtattttataagaagagaagggacacaaagacacagagaggagactcacatgcatacagaggcagagatcggaatgatgagtccacacaccaaggaatgccaagggttgttggcagccacccgaaaccacaagagaaggtggaacagatttgccctcagagcctccagaaggaagcagctccaccaacacccgctccagaactgcgagaggatgcgtttctgttgtttctagccacccagtttgtggctgtcccacaaagctaatcacgtcccttcattatctcctacctcctctcctaaagtcctggcttgaacacagctgggctctgggaagcgcacagaggatagtacccggagagtcacttctttgaagccactctattgttctatacctgccaacacccagggcttcaaaacagaaaagaagttatgaggtcaaaattgtgaaatacttctgccacatcgcttatgtctctcagatcttcagtcatctctaacacacattcctatgtcactggatgccagactgagatccagagactcttgaaaaccaaaagcttcccatttctcagggcccgttctgcaaaggggcagcatgctgggggctgagagcctgtgcgctgcaggctgggctcacgtgacccccactgctgctgctttccagctctgtgacttcagttacctggatggtgaaacgggactaatgacatcactgcatccagatgatatgagttaatagatggaggctcctcacaccacatgtagaaacagtgatcatcccacagtcagctgttgttaccaacactgcagcagataaaagcatgatcagtccttcactttcttctgggagttgagaatccctagtggttgaagcagaagaaccatttttaaagagacgtaaatgaacctgtctctctgtgtggtaagacaggttacatattgggcatgctgacccttgaagaacaatccttagtgaattttgcttccattacattggaacatcggaaacatacaatgctgacattaataagatttcacagtgaaacccaagggatggtcattttttagcaggtggtgttccaagcccagccaaacattgctgtggctgcaggggaggcactgactggggctgacccctgtgtgcaaattggatggggaggaggaagctgtcccatgattaaagtagctggaggcggtcactgtgaagatggtgtcttggtcccttcaggctgctataataaaacttaataaactcagtatcttacaaacaacaacatctatttctcacagttctgggtgctgggaaggtgctgggaagtccaagatcaagacgctggcagatttggtgtaggatgagggcccacttccttgtttgtaaaggattgtgtctttttgctgtgacttcccatagtgaaagtggcagatgagctctctcaggcctcttctataagggcactaatcccattgatgagggctccacactccaccctcgtggcctaatcatctcccaaaggcccacttcttaacatccccataatggaaattaggttttaacatgaattttggagggtcacaaacatgcagaccatatagcatgtggagaggagtgccttagtcacagtggggtagaagaaggtcagtggggtagaaccagtggggtagaagcaggtcacaggatgtgggtgagatagacagctggcctcatgtgagaagtcactgtcaccacaacatgcttatgaaaaatcttcctgcgccataggattgttaattagttaatattgattatccatctactatgtgccaaatatttgtaagtataatgtatttttttctgcacaatatagactattataaaagaaaccatcccaggcctcattataataagtccatccctcctgtacttgtccgaccctaactgcctacacagagaagaattaatggagcttaatatcttagggacctcttgttcatgttggtgcaactctttctggtcatgatggtgatcaacattagaacctgccctaatgtgaaaatgttacataactaaagcatagaatccatagatgggtttttcctgtactcatattatgctttgttcattgttgtttgtatttttaatcagcaggaaattttgcattgtatttaagagcgtgtgttgtttttatgctcataatgagatctgtacccagtttcatggaactctagtttttggccatgacattcaagatgccaattgtactgaagcctttttttttttttctttatatgaaaaacctgtttcttctttttttttttaatgggagttttttctgggctaaaggtctctaacagaaaaatagaatcatattgttacattttagtaagtgtcagcatatactaccagatttattcccagatgagcgaacaagacttatagctgtgaaatgtatgaaccacttaagctaatgaattaggtcagaataaattaagaaaacatacatcaagatctagagaattccaatgtaatttttattgcactaatccatacattcatgtaagcaatggtaagttcccataatatttagcaggagaggccaacactaatattagtacttaacattgtttgattatctgaaatgttaaataaataaaccctcccaggtttttctcactcttttattttctatgattattgctgtgttatgaaatttaggaaatgaagaaaagtttaaatattataataagaattacctgtaatttcactgcctggatttaaggaactattaacagttttgtgtcataatatgttgtctttttgtgaacttaaataaaatttaaaacataatgctgacttaatcatctatttggtcaacacatagttattgattatgtagcatctatcagggactagggaagatactagagatacgaagaatgataaaaccagctcttgacctctaggagtttatagttggctgtaattatgagagcacccaataaaccctctaacaaggatattaacaaaagattctggtagtttagagaagaaaataaactctgcgtgaaggggtggagaaagcatcgcaggagattgacctgtgggctggagaaggaaagagtggggataagcctggccatgcgaagcttgcaggatccacagatgtgcatcaggggatgctctaggaaggggccagggatggagtccctgaggccagagcacagctgcctgtcagcaatggaccagcaagaaagtctagcagaaggtgggggctgcagggtggagggccttgtagtcatgctaggaactgtggagtttatcctgtagtggtgtgagatccagggtaataatgatgacggctaaaactcctgctgagttttctatatggtggattgagttgggtttggaaaagctgaagcacaaagctcagggggactagtgtttctgcagggctgctctttctgtgtgggccagactttccttggctgtgttaatcatagaagacagacactggcctaacaggctcattcattgtcttatttcttctcataaatgcagcatggggtaaagcctggagttacccatgtgcctggctcttgcacagaaggtgtgagtctcccattacatgaaggtccaccgcctactgtggggactggtgaggtagggagtgtaaggcatcttctgctgagtgtctgccagcaaaactccctggccattccaaagtgtgctggagtgttctgacgcctctcactgctttcttccaggcagcaacatcagacttatactagtatccaatcagatagtcttatatcattcaggacagtgaggggcagaggtttttattttttccttttctttaataaaatatgttttaaaaagcaaccataatttctgggaaagtcagacattttgtagtaaatttgccttgcatgtagtttttatttgttgcaatgactcactggcttttttcttacttaaaatcaataagtagtggtgaggggcagctatgtgtgagtgttggaagaaccaaaggtcctatggcagtggtccctaacctttttggcaccagggaccagtttccgtggaagaaaatttttccacaaacagggtgagtggagtggttgcagatgaaactgttccacctcagatcatcaggcattagttagatcctcataaggagcacacaacttacatcccatgcatgtgtagttcacgataaggttcatgctcctatgagaaggtaatgccaccactgatctgacaagaggtggagctcgggtgataattctcgctcacccactcacctctggctgtgcggcctggttcctaacaggctacggacaggtactggtccatggctcgggaggttggggaccccctgccctgtagtgggtttgtctgaggatgccccaaaatagatattgtaatttattctcgatcttagtgatgaagaaacaggatagaagaggctcacgggactgcccaggtgtgatgggctagtaagccgcccagctgggatggaatccaggcgatgcagtcttctcagctccacacgctgcccccaggaacctgagccaggaggcaggagcagactctgatgtccatgctgggcatgggctggagtgggtagacatccaggctgttggaaaagacaagacagagggccctaatattccgcatcagtggtgaggatgccttggggctgctgagagggtaaaggggaggctgtcagttcagcgtttcacacaatgggcgttcatataagacttaatatgaagaaaaggccgatgacgtgttttgttattgttgtcattattgagtttaaaaatcactactggaagtcagaattgccaccttgacctaaaatgtttgatactaatgtagggtgagtgaaccaacttccaaaggagattttgatgtagaatgaacaaggttgggtgacctattagaagatgggagcaaggaagaagcagtaaagaagagtctaaatttccggcatggagcctacctgaatgctcgatgatagtattaagaaatcataaagaaatttcagatctgatttgtaggggtagaagatgttggacattatctcctgtcatccacatggaaatagtataaatctaccattatgcaatagtcatgaaaactcaagaaaatcaacagaaaaaaaatgtttaagatcttcataggttgagtttgtttggtggatacatgtaactctcttctatgtcagcctcagttacctgtatactggccacatatagagttggccttttttggtttttcaacagaaaaaaatagccatatcccagatttaggaacataatactaaatctatattaaataataaaatataaaattatttaaatattcccatggtttagaagataaataagaatgttcattggtttttttactagtataatttaaataaagccttttgagttttaaagtcagttgttgggccaggcgtggtggcttacgcctgtaatcccaacactttgggaggccaagatgggtggatcacgaggtcaggagttcgagaccagcctggccaatatggtgaaaccccatctctactacaattacaaaattagccaggtgtgctggtgcacacctgtaatcccagctactcgggaggctgaggcagaagaatcgcttgaacctgggagctggagtttgtagtgagctgagatcgcaccactacactccagcctgggtgacagagcaagactctgtctcaaaaaaaaaaaaagaaaaagtcagttgttgtttttaataaaataagcttaaacaaatttttatcagttcttttattggtcagttttgttttgaaataacttactcgttttaaaatccagactgaaattcttctcagtatttggaaaaaaatccatctgccagtttatagacaagccagcatataggctttgacatatataagctgtcatgaataactttgttctattaaatgactagtcacaatttaatattttaccctaggattttttcccatctggctctagtattaggctgtattttaaaggataccggttctaagaagttgccgtaactataaataaagtgacagttactcgaacagataggctgtactcagccaatagcctggccatttagaaagctgaacagaaccactttaccctatgttgacagtgagaacaaattgaacatccttgacttaagtgccatttgtacacccctttcccgtaacaggaagaccctctatttcttttgctgtgctcatctctacccaatacatttaaaccgtgagagggagctgtgtctctatttttccctgaaaagtgctcgtctgttggcatttctggcggactcctcacagctggatatttggggttgctttacataacctggcatgtaagggacccaggtcacttctcctccataagctcctgacttccatgcattggagaagcttgcctcccagggagtgacttaccagaaatggggccagaattgataaatcaaaggggtttaggggcaagatcagtgtggaagcgggccccagagagaagctgcattagcggagctcccgggagcactgttttgacctcagggttctgttgattctggggccagctaggggcggagccaaagccaacccaagccactcccccatgtgcagcatcccagcctctctcccggcggctgctcctcgtggtccaccagccaccctctcaccacagggccggctgttgggagcttagagaatcataggaaagaaggaggcaagggaagaatggagggagaaggaaagagtttaacttaggccaaatattgttattaaaatcatacataaagtgaaatcctttgcagtttaataaaaagtccaagttgttaaatacattaacctgacagataaagtctaatatttctgactcatctggagacaaaacttgcctgacatgcactcttggtggcaaatcctggcatgaactgcagtgaggctgtttatatccttgatttatcccactaagtatgaatattcatatatttcaccacagttgtatccatgtgttcgattagaccctgctgtgggtctacataaaatatggcctgtactctgtattaccttcctaaaatctgaaaagttctggaacctcagatttcagatacgagttaggaacccacattcatattctcatattacagggaaggaaacaaagacacagagtggtcagagacttcgccaaagtcgaaggtccggtgtcagagctaggatttcactccccagaggctgctgcacttgccaccgccacatgtattagtctattctcatgctgctaataaagacatacctgagattgggtaatttataaagaaaaagaggcataatggactcacagttccacgtgactgggaagcctcacattcctggcagaaggcaaaggaggagcaaagtcacatcttccatggcggcaggcaagagagagagcatgttcaggggaactcccctttataaaaccatcagctcttgtgagacttattcattatcatgacaacagcacgggaaaaacccacccctatgattcacttacctcctaccggatttcttccacgacatgtggggattatgggagctacaattcaagatgaaatttgggtggggacacatccaaaccatatcaatatcctcgatttatcccactaggtatgaatgttcatgtatttcaccacagatatcctcatgtgttcgattagaccctgctgtgggtgctccataaaatacagcctgtactctgtattaccttcctaaaatctgaaaagctctgaaaccttgggtttcagatacaggttaggaacccacattcatattctcatattacagagaaggaaacaaagacacaaagtggtcagagactttgctaaagttggaggtctggtggcagagctaggatttcactccccagaagctgctgcacttgccactgccacgtgccactgtctgccattcaccaggcaacccttagccaaagtcagaagtccagtggcagggctaggatttaactccctggaggctgctgcacctgccactgccatgtgccactgtctaccactcgatacttccaagataaatgagcaaataaaaataccaccaccaccaccatccctcgaaacaacaaagtccattctcccatccgttcctgtcactgtggaagctgctgaagttcagccgagtgggtgaagagatgcacgccctcctcggtggaggcagcgactgtctgcatccaggtcagcacaggcagagtgcagtcaggctaaatctcatcgcaaaatagcacattcctcttagaaccccctctacgtgcactttttaaagctttttattccacccctgatggcttactgaagaattttttttgagccaacattcacgttacgaactttccctctgtgcagctcattcctcatctttccatacagaatgggatacttattttttttaagtatttacttgtactacatggtttttttgtttgtttgtttgagacagagtctcgctctgttgcccaggctggagtgcagtggtgcaatcttggctcactgcaacctctgcctcctgagttcaaatgacccacctgcctcagcctcccgagtagctgggattccaggtgcccaccaccacacccggctaatttttgtatttttagtagagacggggtttcaccatattggccaggctggtcttaaactcctgacctcaggtgatcctcccacgtcggcctcccaaagtgctgtgattacacgtgggagccactgtgcccagcgtacttgtaccacacatttattcaatacgtatctttcaggcactgttctagatgttgatgatgtggctgtatacagtacaacacctctgccttcacagaacctgtactttggtagtgaaaatggacaagaaattaataagcaaatatacagaaatgagacagcacttgctacagaaaaaaaaaaaatggaagcaggtgacagaggctggggcaggtagtggtggggaagggagttcctgcggtctaggaggtggtcagggaaggcctctgtggtacatgatatctgaagatagatccaaaggaactgggatgggcagccacacagatatctgggaggggagttccaggcagatggagctgcagacacacaggccctgagatggctcctgtgtggttgagtagacagcagtggatgtaacctgccagggcccagtgagtgtggagaagagcaaggtgggtgcagagaagtagcagggccctgtgttcagagggccctgtcagactccgtgagggtctccacttttctttaggataagatgagaaaggattgaagagttctaagcagaaagtcagaccttactttaggggctaccatgctgggagaattctgtagctggagtgaagatgatgacacagaagtctcttgtgctaacccagatcagagatgatggaggtttccaccagcagtgggcgtgctgaggtcagtgagaagccaccagtctctgcacatacgagaggtatgtgggttagatactggcatgagacaggcagcagagtgaaagatggcaccgtgggactcggcctgagtcacggaagactgggtgtccacttactgagatagggagggcagtgggaggagcaggttttgggtaaaaatcaatagtttgagattcagcatccaatgggatgttcaaactgagtcaggacgtgccatcatcatcaaataggtggtctttaaaggcaagaagaatggatgagatcgggaaggacatgtgcgcagagcaaaggcagggtctaaacctgagcctgcagcaacagagtccagacttgtgagaggaggaccagacagcaaaggggaaagagcggcccaggacatgggaaggcagctcagagaggtgaggccactgccgctgttcacgtctggttttttcttttgttcacaatcagactcctttctaaggaatgggccatgctcatcatctctcttgccagctcaccattttttccttgtgaatcttcagctgtgtgtctttgatcttcacagaaatgaccttttagtttttattccatccctgttttttcctttgaatggtttttagaattgtgcctgtcctttcaagtttcgtaactaccgtattcatccctggcccttattagtactaactgagttattgcaataaccttgatttaccaactcttccactttgaccatctggctcatctgagtcctgcagccataccaggctttcagagcactgctataattctgtgattctcctgcttcagctcagcaatgcgtactacgtgaatcaaggtcaaaccacttcattcaagcagagccatggcctccatccgctacccttctaattaagtaatattatctgtgatagttgtatagcagactaatagttctaatcattatagtaatagttgtagtagtagtagtagtagcaacagcagtcacaatgctttttgagaccttagtaagtcccagctgctgccattcggatacatcatctcatttaattgttgcagcaactctaagaagagttattataaccagtacccctccctacctgaactctgactgtatgaactcggtaatgaatgggatttagataacacatctctgtccagactcagtatcaagcatctcattatccacatgtagaacctgaataagtgtggatagtaagcagtcctgagtcaccgcctccttctgcagatacccaggggcttagaaagaccattcataacttgccaagatcacacagccagtgacgacaagccgagatctgacctcaggcctgtctgactccaaaacccgacctggagaccatgtcctccagggccgttgcccacctgcttttgtgtcagccttcctcccagtccctcgagtgacaccaagcaccttcccatagccccttcccagtgagagtcccgccctgtccatccttatgcccagcccatagcccctggccttatctgccccacacttagcactgctctgtatcctcagcagtgaactagccttccagaaagctctgtgcttcaatctcatgccaacatagacaaataggacagtctcaaccactgtaccatcaccaggcctgcttaaacatgtgtgtgaaattcaacatatcatgcatttttagtgtcatctacactgtgcaaggctcaaatgagtcctcaaagaggtagccactggactcctatattaagaaaagaattatatataattaattttgaacaattgtgacacagcgtatatgctctatgtgcccaggatacatttacatctcaatgccctggaatactaagtgtcactgacttagaggcactgtaagaagtgctatataaaccacatcttctatacctaactgagaatgtggtgctcagcatagctgaagcacagaacatagatttgtcaggcagtcacagtcaaggacaatggagagaccagcagttatggggcagttaaacatgtactaaatggtagtcgctgtgctcagcacaacatgagttccagggactcagcactgggcctcctctcgtcctcagtttcttattctatgccctctgaagcaggttcagaatcttctagacagacagaattaatgaataaaacaatgaattgtcacacatagaacttttaatgtgcaggacctggacaacataaggggttaaaaatcaagcccattgtaataacagctccttgctgttgaatatttacttcttctatttgatccctaaacagtatgctgtgagtatcatagaatatcgcattcccttcctcagtgaatttttttaaatgtctgcttcttaaggatgaaatatttgtaaagttggaggaactactcaaagccctattatttcgcatgtccccaagctccacctctgataaattttttgtaccggtaaagacagcatgtgatttgtaaaatttgtacccatagtaattaaaaatatgacctttatccagatcctgttgcagaggcacttatgaattcctctaaagtacactctcccgctgttattgttgttagaaacatgtttccactggttgacttttcaaagatgatttctagttttaaatgattaactttgctgctgtgttataagtcactggactgagagggggtaattgtggttgaaagaccagcacaagagaactcttttctctttattgaaaggtgatgcgatctcatgtaataattgaccaacacttccaattaacggagcatggctcatgaataatgcaattattcttttgattaaagtaatctcagaaagaaattgcatttctgaaaaaaaaatacaatttaatatatacatgccatagtaaattctgttgctttttgttggtggagcttatcatgcaaggtaaatggaaataagaaaactctacaatgtggctgaaatttgtgtgacatccttttaaaatgtgagtagtttcaactggcacaccgtttttttcttttcttttctttttttttttttttttttgagacagagtctcagtctgttgatcaggctggagtgcaatggggcaatcttcactcactgcaacctcctcctcccgggttccagcgattctcctgcctcagcctcccgagtgggcacctgccaccatgccagctaattttttttgtatttttagtagagacaaggtttcaccatattggccatgcccgtctccaactcctggcctaaagtgattcacccaccacggcctcccaaagtgctgggattacaagtgtgagccaccgtgcccagcctagtatactcgtttttaattcatgtttcaagttgatctagatggggaaccaatttatttttaatgtcgagtgaggctgtgtcaagaaacagaagcagagttcatattctcagcccttaaactggtggactgttagcaatttggttgttgcaacgttgaatgttttggaagtgagttccatctccttaggaaaataagacaggtgtttgcaggatttttaaaaaattactaatgaaaagctagagcatcaggaaaggccagcctgtgggtgcgggtggagaggccactcacacagggtcttgaatgctcttccagagatgtggagcaggatcctaggagcagtggcaagccactgaggagatttgaaataaaagagcatcttattcatattcgcctttaaaaaactaattatgtctaaaagggcctaataggaagccagccagagagaagactgtcccagaaatctacatgagaagtggcggcatgggcgatccagagccgtgaggtcactgggacaagctgagatgtgggggtcaaagagaacgaagagttaaggtgattctcgggtgtctggatttggaactgaacagagagtagtgcccttggcttatgattagacagaatgataataaagaactgttgtgcactcaattttggactgaatttttagtgtctgagagatgtccaggtggaagtgtcaagttgacttctgtgatacagattggtgagtcagtaaccaaatattttttggagaatctgttggcgccaagtaccattctagggtcagaaacacacaacttacgagtccccgtcttcgttgacattcgtgtgttttatttgaccctaaagcagtattatatgatttccttagaatatcacgtcacctgtctggtgaatttgggaagaggtagggggatatacaataaacatgagaacaaatcaataagataattttagatgctggtgagtattttggagaagataaattaggacactgtggttgagagtgaccaaggggccaagggtgggagctacttgatcaagttcagagaaggcctctgtgcccctcatcaggatctggaattcaaatgaaaagttggggctagagacagagatttggaatcatcctcgttgagatgctggttaaaggactgaaacgtttcattggatttaggaaccagtaggcatgttccacggcatctcagagtccctggaaggtctctgcaggcctcctcccaactccaacagctcagagcagtggggggtgctgcagagagtgcccctgtcctgtggggttagcttaggaagactggtagcagaacccctaatgctgtgttctggaggcgggtggaaaatcaaagccagtgaagcctatcaggacatcagtccaaggacatgcaacactggggcctaagacggggaggaacagaagtgtgagaggcgcggatggatggcagagcagtcaggtgggaggctcctgaagcaactcaaagatgcagcaggggcccgagcgctgactttcagtctgcacgcccatcgctgaggatttcgctccttgaccgaatggtttggagaacaggtcttctttcagaatgtcatcttcccgcaagttaatattctgaagtggagaaaacaagctccaaagttacccgagctgccacagtcagcttttggaggcagcgggctacctcggctgtctccccagactagaaagctgtaacaaacgtggtttattctggaagcagccaggaagatgctcagttgctttctgatttataccatacacgtgaatcaaagaatgtgactgaaatatttatgcatatgaccgtgtgtgtgtgtgtgtgtgtgtgtgtgtgtgtatgtgtgtgtgtgtgtgtgcatgtgtgttgatatgcctgtgtggtgagtttgaactggaaatcaataatcaacatgtgtcaactcattttattttctgtaacttttctttgacaagctgccaatttctctcagcagcaggagaactaaatttagtccaacctagtaaaatcagtgtaatcattttttagctacttctggtttaaaacctagactctttttgacagtatccagttgattccagtattgtcgttattgtggacattgttcacagtttaaagcctttctctctcggtttggcaaagcttagccccagatggagtggactgtctgcagaggggtctcttccctgttctcttcttccatgtgctgacggaggtgagaggctgggtgggcccaggaacgcctctgtgacagtgcaccttggtggtgatgaggggccaggcccgtgccaatggtggtgagagcctgggtgggcccaggaacgcctctgtaactgggtaccttgctggtgatgaggggccaggcccatgctaatgacggtgagagcctgggtgggcccaggaatgcctctgtgacagtgcaccttggtggtgatgaggggccaggcccatgctaatgacgctgagagcatgggtgggcccaggaatgcctctgtaactgggcaccttgctggtgatgaggggccaggcccatgctaatgatgctgagagcctgggtgggcccaggaatgcctctgtaactgggcaccttgctggtgatgaggggccaggcccatgctaatgacgctgagagcctgggtgggcccaggaatgcctctgtgacggtgcaccttggtggtgatgagggactgggcccatgctgacacctcgtctggctctgactgcagctgtcctcaccctgtcagctctcagaccagagcttctacccttgttcctttggagctgagtggcacaccatagtcacaccaccctgtcttccaggatctgggcaaggctgcactcctagagtgggccatccacccttgtctcttctgaaagggtccctcccagggggcgtggtaagctggttatgcccctgtggcctttgctggcctccttctctccatgggaagccatgcctccgtgggagacaggtgacctttcgccaccaccatgctcactgtgtccctttgtcttctctacatcctacgtagatacacacgtgggaggtgcacacagtaggcctgaggtttctttgtctgcatccgaagcaatttttaaaagccccactgccctgggatttcctaaaccttagatgttagaagttttctaagaaactgccaccttccagactgacagaccagaaaggagaccaagaaagggatctgggtccaagcccctggcccttccttgatcgtcttctatcctcctccctctcggcattgcaggggccaggcttcttcatggctgctggagactttgctgtgtcatcagtgcgtcctcccggaagtggcctttgctcccctttgccctggagccataataaatgaagggcttccggggtacatgatttgatatctttcacagtagccacacgggtaagcataaaccaaatgatgtatacattttcaggtagggccaatccaaatgcaaaaggaaaataacataattaagtttataaaaaatgattctctggatgtgaaaattggctaaatttttattgactcgacttttttttaattgttttcaccttcatttttaaaaatgccttttagagccaagtgcggtggctcacacctgcgctcctagctactcaggaggctgaggccagaggatcacttgtggccaagagtcgagaccagcctcaacaacatggcaagatccccatctttaaaaaaaaaatgcattttattcagttatctaaataacattagagactatcagatcccaaatgtttaatagagttctgttttgtgctaggcaatgtgaccccagcgtgctcctgtgacatgtttccctgaaggctggccggccagtttacaagcagaattttcctcttaggagtcttcacagttacatcaaagaatcttcagtccagtaatgtttccaatctttggaatcttacccttaaatgtgctctcctaacaaaagaaaatctataaagacccacaatatacaacagatacatcagaccttaatcaccaaatgaagtatttatagtatatatacgatgtacttctctattctgtggtggaggacagacagtgggaagtatgaactagttattcctaaatggctagagagaatgttgcagttagtggaacaaagttcctagagggaactacatgaaattcatggcacgcacccggatgatatttactgggagcattttatgatgtgtgtgaggtggagaggctaatactgatgatggcggttttcaatgagggagcatgccatgagtacccagccagggtctgggtgagtacttcttcatgcagcactgttgatttgcatctttgttgttgttttgttgttgtttttgagaagattcagtctcactctgttgccaggctggagtgcagtggcgtgatctcggctcactgcaacctccgcctcctgggttcaagcaattctcctgcctcagcctgctgagtagctgggactacaggcatgcgccaccacgcccagctatttttttttgtatttttaatagagacggggtttcaccatgttggccaggatggtctcgatctttgaccttgtgatccacccacctcggcctcccaaagtgctgggattacaggcataagccaccgcgcccagccaatttgtatcttatgtagcacatacttctaaagaatcagaggtattgctcatgataagtcaacattgattccgatgaagcaagatgtgtacgggatagtgaaggatttatggttaattgcagacagattttatgtttgggtttaatgccatctaggtacttttcgtcagtttgaaaaactatgttgaattggtattaaaagcaaattcagcttttataactttacatcacctggggctctttggaagtttcctttaaagtattttctgctttgccacctcctcttaacttttaatagctggtttggttgtattctagcatgcaataagtaatttccaaagtcacataaatagctagagagtatcacattatcttctccattagaatcatatatcatgttttacttctttatatctacatacataagttatttcttaatttctatatcaaaattatctattgttttagaataataagaacaaataacttactataaatgtcagtaatcccttatcgctacacattggactgtagtttaagaatgtaatgataaaactagaaaaatacttaaagcaacataaacccctatgtgtgaatgcaaggtgaaaagattttcttatataaatataatactatagtctacttgatagaccttcatttatgaatgataatttagtgattatatcatatccgtttccccacaagggctttaaatttaaattaatggtgttccaggtaccctgtgaggctgatttttgctgccataccttgacttgcattttctgctgacattgatacattagttctgtctatcactaccctgactttcttttatacaaatagccctgtctttagatatacatgtgtaacaaaacagcatttcctcatggctaatgctgcccctgtttcttgctatgagtgattgagatgcttttgggcagatgtctgcataaactaaagtgctgcactatgaaaccttaccagtcattcagattgattatgccgaaagaacaagttgacactaggtaggataataagatgagggatgaaaataatttgtaaattggttggaaaaacttgcagagtgtcatgaattctgtacttcagaaacatcaaaatgttcaaatgctcagtgatgaatgtttttctgtataacacagatgactgttgtatgggttttatgaaattcctattatataatggaggaacacattacctttgatttccatttgtgggtcccagctcagggctcttggtaagggtgtgtgatttatacaagaaacagtatatagagacatctgaaatctcttttgacaagaaactttttgcaatgtttagtttagaaatgaactttaaaaggtatatcagcttatggaatactaagggttttctttgagtcactgaaaaagctgccctgtatgatgattgtcatctgcaataccttaataacctgaccacacttccaggatagggcggtgggttaggctttcttatgctactcacagcccctggagagatgagaaacacttggtaagtatccatcagataaaccctaaagatatcatagtgaaaatgcctaagtggctaaagaatagtatttctcaagctatattttccagtgagattacttggtcttcttggtaaaatgcagaccctctgctcccaccctcagggacttattcaggaggaacatacaggttgacagcacctggcccatacttgaagaaaccatattagagacttaaagacatggtccgtggtgtttgctgggaccaagaagagtacagataattagttatgggagagaaagagacaccaaaggggatgaagtgcttttgatttacatattttgaccctgctaattggaacctaattagtacattccaaacacagacattaagtatctacttgcagtgataaatcttagatgtatatgtcttaattgaagctaaacctctcttcttaaagacaagcattagatttccctgataaggcagtcttaatccattgcttgtcctaaatgtgatctattagataaagcaatgatacatatgaaaatttaacaaaagtgcatattaccagagacacaaaggagattataatataataaacgtattatgtaacaatttcaggatgttaaataaatgcaaaatgtagcacacccttggaaatgacaaataaccattattagaaagagctcctctgaggatatcatgagaactaaggtagccaggaaggtgagatgcacatgctcccttcactgtgcatttagtaaacattctccaaggctgactgtctacactcaagaccagacaccatgccaggagccagtgaatgcacagccactgatggacaaggacttcacaagctcctaggtctcctagatatgagatttgccgaaattcctcattggccgtattacaaaattgaaaggccgagtaccaaaagaggttaagtaaagtgatgtggatgtttacaggataaatcaatctctctcggtctccatttctctctgcctctctctccctgtctctgtttgtcttctctctctctctctttctctttctctcaatctctctctttgcagatgtcacttacaatttctggtgacacaagtttgtacatatgttcgttgtagtgctggggagtagagaaagacaaactgtataaaacacaaggaaataccatgctaagacatttaggcactaaatacatcaacataccttaaattataaatgtctggaaagagaattccttatcgtaacaaagcaccttatctttagggtctggcatctgagtctcttaattctctctccctgtacaaactcataaagaaaagttagtaaaaaactataccacagctgacataaacaaatattgcattatgctcgtggactctgtgggtcaggcatataagcagaacataggagctggcttgcctttgttgcaaaattactgggttatcatctggaacgacctgtaggttgagataacttgacctctggggactggtatgatctgggcgtcatcacagtagatgttggctgtcttctgaggcctcagctgagactctgggctggcacacctgcagcgacccttccatgtggcttgggcttcctcacaacatggtggctgacttccaagttgggtcctgtcaaggaaacaaggtggaagtgcatgacatgtttatgaccttagccttcaaagtcacatagtgtcactgtaccctgttggttgagacactcacagtgttctgcctgagcttggggagagacaacattgtccctaccactcagtggcggagtgtcaacctgacattgtgagaagaacattcaaatgataaatatgtgacagccatctttggaagatacagttggccatactttgggtctggcattttagtcatttaattcattctttctgattaaaagccttgaaatatattacttcagaaggtgagaaataaaacacaaaagtctcttatgtccttttcataggaaataggtccatgaactacgtctctaaaccattctgaacctggtttatataaacagcttaagaagtatgtcccaaatgcttgtcagccattgggtaaaatcaaacacgtacttcttttattttatatacagtcatgttgcaaacagagaagcaatcaacaccattaatccctcaatattttctttaagccagagaagcatccttactgtttcaagtacttcttcactgttgcatcatgacaataatgagttgaatggccctggttctcagcacaggtgcactcagccctaaggcaagcaagaggccaggagggtgcattgtgaacggcgctcaccataaggagaccatatgagagagggggtcagtcatgcaaatgtactgatgtgagtcagctgggcctcttttatgttcctccaattttgagaagaattgtctcactgtcttttcaacactttctctggttagaactgatttcagcacatttgacaaatgtagcaatgctttgtgaggatactatgttataataattaaactaataattacaggtggtgtatttagctacttgcaaactcacagatggctaatatagttttaaggatccctgaagaaagtcatatatgtgactaaggtcttgcagaaagagtaaagtagaaaatttaatttctgaattaattgctttattcctaagagacgttgcccttgatagctctgcatactctggaggattttccaagttcatggttgactctatggctgtgtttttggctctaggacactgtgacattctgtgaaatgtgttctagactgggcttgaatgcttaagtttagtacaaagaattatgctgttgatctactgcagacacctgaacctaagcttgaaatgcaaataataggttttctgcaacgaattacaaaggcaaacagaagccatccctatccagagaatgaactacacctcacagttaaaacagaaaactggagaggaggtgatttactatggctactcttaatagtgaagacagaataatactgtttaattttatgagaatccacattggcaattaagaactatagggctggctccatggacagttgcaggaaagtccacagactatccctggcccctataaacatgagcctaggtgtttgttctcctccctactgtttcattaaactctgatggacacacacccttgcccccgatctattgatggcttatatactgggataatgggcagaagggatatatactcagtaagacctcccttatggatcaaagctttgtctacatactactgagctgttgactttgaggcttttattacactttcagaatatgaaaatgcatttctgtacaatccatatctgtgtgagtttaaaaaaataataaggcaaaactacaattacttctggccactgtccttgggcatctcaaggctatcagatcttttactggagaagcaagcttgttttgtctccacctgaataatccctggctggaagagagccaaaagaccacatttcagcatttctacccattctgtgcatcatgcaccagtaataaatgcccaagtaaacaaagagatgaaatagcaatgctatagccataaaaccaattctattgattttattccagcaaatctcataccgtactaaatttctcagaagcacgaaaatatctaggcctttattgctcactttaactgggctctttgcatgctcttattttgttttaataaattatctgaaaggattaaaattaaaacatgattcttttcctaatgctaaaagcacttctgtgacacaatatgcttaacactgaagaaactcaataaaacaaaattatatcccaggatagaaagatttagaacattagcaaacttcttcatttagatgactaatatgtttttctcaatgggattttgagcatgtttgtatcagcacagcccaaatctgaaaactcttactatttctattgaaaaaaaaaaatgttgacaaggaatatactctctgagtatgggcccatacccagttgcacttttaaacacaggaagtttgtgctggcagcaggatttaattgactgagctgtggtggtggctgcacttgtcatctctgcttactatgctctgtttttaaatatttattgacttcacacactctgcacgatggctgctcagagaccttagccctgactgaagaagccactgcagggtgagcaggggcagagagccacgcctgtcgacgagatgctattaaccagtttttgctctgcccctgtcatgccctatcagaccctctcttattttgtatgttctgcatactgttcagaagataacagttggaaacaatatatgaaaaggctctgaatggaaatccttataggtaaggatgtacgtctcagggaagggttcggtgaatcactctgggttacacagctagttggggacaggtgtaggacaccttccacaacctgttactattaatacaatttcccctgcaccatattacattatgagcacaatttccttcagagagaaaaatatcaacattcaatgtctcatatttccacttgattgccactgatcttattgtagttcagagccaataggaaattaagtgttttatcaaaaataaatttgaaacagataaatgtactttctttcctacaggggccaaatttagtatgaattttttaaaagtgcccaggattctagaacagcaatggaaccatcagtacaaattgtaggggaccagaactaaaggagtctgaagatcctaaactcaagatcccaatcctgtttgggttgtggcattcaactcccagggtcccactgtgcttaaccaataggggctatttgtaaatgcatccatggcttaggaggctgcatcaaacaccacccatccatacaatgagccctgtcactgacgtttcgcctcctccacgcgtatgaacgcagtgactactgtcactgatacaccacctcctccgccacgcacgcacacgcagtcaccactctcactgacacgccacctcctccgccacgcacgcacacgcagtcaccactgtcactcatacgccacctcctccaccacgcatgcacacgcagtcaccactgtcactaatacgccgcctcctccaccacgcacgcacacgcagtgaccactgtcactgatacgccacctcctccgccacgcacgcacacgcagtcaccactgtcactcatacgccacctcctccgccacgcacgcacacgcagtcaccactgtcactgatacgccacctcctccgccacgcacgcacacgcagtcaccactgtcactgatacgccacctcctccgccacgcacgcacacgcagtcaccactgtcactgatacgccgcctcctccaccacgcacgcacacgcagtcaccactgtcactgatacgccgcctcctccgccacgcacgcacacgcagtgaccactgtcactgatacgccgcctcctccgccacgcacgcacacgcagtcaccactgtcactgatacgccgcctcctccaccacgcatgcacacgcagtcaccactgtcactgatacgccacctcctccgccacgcacgcacacgcagtgaccactgtcactgatacgccacctcctccgccacgcatgcacacgcagtcaccactgtcactgatacgccgcctcctccgccacctgcgctggcatggctgagacagcggccttttctaacttatttcccttttcaagactgtttctactggacatgttggcatgatttcatctgtataatgactttgaagagggcacagtgccattattctgctcttaaaccccgtgtccatgcaatacaaagtgatggacactttattgtgatttcattgataaattaagggaagttttaattaggcaacaatgccaaatgcacatatagctaggacattaacatccatctaacataatataaattgaatgaaactgcaaaatagttgaatgggaataaaaccaaatcaatcaaactgctttataggattatgctctataaaaaattttagtaagaattttcattttataaacgtttaagttgaatgttttgaaatgattgctataatgactacagtgattttcaggaatttggaaattcagtaatgttatcatttatcccaatgattaaatgagaccaataattccaactgatttccatgagtttacctgaacatacctttgtcaagtgcgtttcagatcatggttgacaagttgaatggtatctgtggtttaagttaagcatctacatccccaaatatcggttagtatgtttccgtaattcatttttttttttttttggctatttattgaggaaattagtcctgagattattccgtaagattttgaaacatcatcagtcatatattttgcacaattatagtaggaagtagagtcagaatacttgggttttagtcactgctctgccaaatattaaccatctaatattggaccattggcttcccatctttgaatttttttttcttattgataaaatgtcacagaaacaaaatctaaccaattctactcactcctgggttggctataaggataaatgatatgcaggttggcaaggacagattctaggtcttacccctacttctgcttccagtctggttttattagtcaggatgatctccattgtaatagaatccaactaaagttagctttaacaaaaaagagaattatttgtgcagctgagtcatttcgggcagccttggctgttggcctgcctgggtgcatgtcctcaaatgacgtctcgaagctgtctgtcttcccttcactcggctctcatgccatgtttactgctctcaaatagactctctccccaggtggtagcagagatgagcacaggtagttccctatctatatttccctggcttagccaaaaccatatgtccaagccaacagacgccatgaagacatgagagatctgaatggcagtgcctaggtcaggcgcccacacttggacctgggagatgagacaagcccacttgaatcaaacgaactaagggcagggaaagatgtagctgccggaagacatgccaggcaggcgaaatccacgtgtctaccacctcttccagggaggacagacagaatccaaatgtactttcttcccatttataaaccttcaaagactatccttaactaatatgcaactctctcacatacaataacagcaagatgagtcatgtctttcaaaactgacatgcatttcctagcctgatccagataccatttttatggatgatcaatctgtagataaatgccctaacctgagtgaatccctaactttgcacccaacagtctggttagtttgggtcagggaatttgggttttccaaattttaagcctcctaattagctgactccaagcatccctcattgctcacagccaagagttagaacccctctcaaaaagactatgctttttccctctgagattggaggtgagccaccttggaggaaagattctccttcctgcgggaccctaccagttgtcacaagaagcagctactgaagttaatagttttttacttgctcctctggcattgatgaactgtggccccccccaccaagatatcttaagacaggctaaaaaaaattcacatgtcaaactggcatataacagacattcaatcaatgctaatgaaataaataatactggagaaagtactttatgccatggaagtaattttgtaaatgtcattgttgttattattatgcctaatatgaaagtttttttaaaaaaaattttacttgttttagtagtaaaaagtgggtcgagagagattaatgagaatagatggtataaaactcaagattcagataatttttgagatgacactgatgtccctctctatctaatgcgttagccaggtttaagaactgaatcatcttagctattgagagatagttatatgacatctttggaatacctaaataaagtagattgcaatatacacttcttaatatctgttcactggcctatgtttaaatgaatttaactttttggttaaagatgtccatttagaatatattatttttccgagagtaaacactattgaatttgagttatctaaatttagtagcataaaaaatgttctcctagcaatgtatatagaagaggctcacaagttaaccaacatccttcagttcctctgaaatacatccctagtgatgtccatagcatgctaaatatttgagactagagagcttcagcatttctcctccctccggtttaattgtgtgttttaacaagtcagttgtgttcctttgcagacctgtttttactagttgtgcttaatatggatttcttaatttaattaaaaaaatcaagtaagccaggaaaccatcaatgaaaaaagaagtgtttctacaaaaaactaagttgagtgatttgcaaagatttaataaagcaggcttattagaaaactattgttgagctatttgcatgcagaattactataaaaatgaaagaatctaaaactcgaaaccaattctgacttcagattgcattgttactgtccttatgtcctagttttactttaaagaaattgaaaccagaaactagaaagactgatttaaaagaatgatgactggacactccaagaagtagatctatgctttaaaaaataaaacaggctttgatcttccattaaaagattgctatataagtgtatgtttaaatgtttttaaaaataataaaacatgcatcaattttctgattaacccaccacatttacatcatagtaaggagttccttctatccttggctctgcctctcttctcaccagaaattcttattttggcttttcttttttccaacttctcccaattcctccactgactttttgttgttgttattgttgttgtagtttttaaaatttttgtgggtacttagtatgtgtatacctccactgacttcttagacctctctgttacacctgacaccttattttttgtctttttttaaaaagtgattgactagtaactcagttaagactcctttgatcttccttttgatttccagaatgaaagaggatattgtgttcttgtatacatcagaaattctctattacagtccataaatatcacaataattctagaaagagaacaaatttttaattaaaataagcactgtgatcatttttctgtcacataccaaagaaatgcaataagcaaggcatcaaatatctatatctaatttacatttgtattaactcaagttaaaggtacactttatcatgaaaactctaaatctattttttaatttgatgactttatattccatattgattacatttatggacaaaactaattccctgatagatggaaatactaaaacaaaaggaacagacagctaaatgacttctaggtagattttcaaatcagcttggaaagattttttctttttattattttaaataagacagaccctttgctttctaatccatttcataagataatttaatctacagtagtgggggaaaatccttattattttgtggcagccagacattcataaattaaacttctttcttagagaattgcttccccacactggaggggaaaagaagtatgtaaactctttacactagcagaaacttcaacattgttgggaaatgtttggtaatgagcttggttcattggtaggtggcctgccttttaatgttgtctgcaagggaatttacaggaatggtactacccagcccatcaggatggtgtatggcacagaagctttaagcgccacagggcactttgcctttgttacactcctttttgcctggggctgtgaaagtattctgaatatgatgcaaaatatcagatgaagagtttgagttcctcatcctatactgcccaatgggttctccttgcccattgcctagacagagccgatttatcaaggctggggaattgcaatagagaaagagtttcattcacacagatctggctgtacgggagaccagagttttattattactctgtcagtctcccagaaaactcggggatgggacttttaaggataatttggtaggtaagaagttgaaaagtggggagctgattggtttggtcagaaatgaaatcatagggagaaatgaaatcaaagctgccctcttgtgctgagtcattttctgaccagatgagccactttatccatctgggtggtcccaactgatccattgaatgcagggtcagcaaaatctctcaagcacagattttaggttttacaataatgatgttatacccaggagcaatttcagaaggttgagaattttgcagcctccagctgcatgactcctaaaccatcatttctaaccttgtagctaatttattgtgtcctgcaaaagcagtctagtccctaggcaggaagggggtttgttttggaaaagggctgttaccgtctttgtttcaaagttattttatcaactaagtttctcccaaagtcagtttgtcctatgcccgggaatgaacaatgatagcttggagatgagaaggaagatggagttggtttggtcagatctctttcactataataattttctcagttatactttcgcaaaggtggcttcattcctgcagggagccggctttccagccttcttgctgagctcagggcttcgaaagatcactggacgtacccttcctataaagttaatttattcagcacagcaccctttaaactttatttccatccctcagaaatataattgttagctttttttctccagttgatcacactaacctgagaaaactgtgtaaaatacagcaattctgtgttagttctggggaggatgtggctgttgctgttggtgccaccagcctgaatagtttcccttcacttggtgtctttcctttcctgaaagaaacctcggtggtaaaggccgtggctgagtctgtcaactcaagcctggtcaaaaaataggatgtcgaccactgctgccagagtcccagtgggatatactccctttttattctcaagctgaagaggtaacctattatgtaggccaatattttgtattccatatctcgttgtctcttgtttcataccagttgagactaattgacactaataatcacatctgtctgtgcgacacagctaagcataagcagctgcccaggtgcccatatgtgctccaagactaccccagtgagtgccttccagaccacataaaactaaaatgctccataaagttttggaattttcactttatctgtatatgttttagaagctaatgaaaagcaagtttttaagacgtataatagcttctttcattatgtgaaacaagtcttgctgattttaggagtaaaactacaaccagaaaactgggggtggaagagaagaaaaagtattttcatatgaatgaggaaagtgaggcttttgcataattttaatggaaaaaggattaagtggttggaaataaacaaaaagtgtgaaagaagaataaaatacatacagtgctggttagcctaagcacaagaccactgcagtccccaggagacgttaaaagagctctggttcttgaaggactcaagccccctggggacttgccaacagttttgaatgaaatctctctggagcccctagtcatctgggaaagaattttactagaagcagcctcatggtattctgagtagcacagtcagcagtcccccacagagcagaatttgatggggtggtaggcattgcgccttgtgcaaaaatatcaactgctttgtgttacaggatgagggaatccaataaatagcccctcctccttgcctgagttctgaaccaactgagacagagttgactgtgactaaaaagactaataatggagaatgtggcaaagatacacagagggttggtgctggctctcactctagtcctgtgcagggcagacacctgaggcctccctctccatggggctggatcggggctgggctgtctctagcaaacatatttcccggaggtgcagtccaggcagcgtacagtgcaggcaaacagggttgaggaggtgggaggaccagggctgagcattaccaccaggtttagctcccaaatttcaaacactcctttttcctttcctggggaagagggagtgaggagtacaggcgaggccaggagtgtttctgctacctggtgaccctccatggggaaagatgaagccagaaaagagagtgtgccgacgttgcgctaacaattgcttttcaagatgtgaacgtactcgatcctgtatggtcattggactgatccccaatggtcatttgaccacagcagagtctagaaggagctctgcacttggagactaggtctatttgtccattctcacactgctaataaagttgtacctgagactggctaatttataaaggaaagagctttaattgactcaaagttccacagggctggagagacctcaggaaacttacacttatggcggaagggaaagcaaacatgtccttcttcacatggcggcagcaaggagaagtgccgagcaaaagggggaaaaaccgtcagatcggctgggcacagtggttcacgcctgtaatcccagcactttgggagactgaggcaggtggattacctgaggtcaggagtttgagaccagcgcagccaacatggtgaaaccccgtctgtactaaaaatacagaaattagctaggtatggtggcacacgcctgtaatcccagcttctcaggaggctgaggcaggagaattgcatgagcccgggaggtggaggttgcagtaagccgagatcgtgccactgcactccagcctggctgaaagagtgagagtctgtctcaaaaaaaaaaaaaaaaaaaaatcagatctcgtgagaactcactcactattacaaaaacagcatgagggtaactgcccccatggttaaattacctcccactgggtccctcccacaacacatggggattatgggaactacaattcaagatgagatttgagtggggacatagtcaaaccatattactagggatttctagtcccagctgtaggacttcctggcatttgacctctgccaagtcattctctgagcctctgtctcatttgtaaatcagggataaataatgccttcatagatggacaagattgtttaagaaaatcagcagtgtggccggacacgatggctcacacctgtaatcctagcactttgggacgccgaggcaggaagattgcctgagctgaggagttcgagactaccctgggcaacatggtgaaaccccatctctactgaaacacaaaaaaatttagcctggcatggtggcatgtgcctgtagtcccagctactcaggaggctgaggcacgagaatggcttcaacccagcaggtggaggttgcagtgagctgagatcgtgccactgcactccagcctgggcaaaagagagagattcagtctcgaaaaaaaaaaaccaggggtgaatatcactgcagactgcaaggctctgtgcaaaggtaaagttttgtaattattatctgtgatggtgggaggcattgtttgtccttggactgaaaaaaaataccctggcccaataaggggatagaaaaataaaagcaagcacaagagaaaaaagtttaagactgtatggaaagccaactctacctctagctattttgacaggaaacctgggatcaagacctttgccccagtcacacttgggatcagtcaccttggattgggccacctcccctctgggagcacgcccaaattttgcctctaggtcaacagctatttgctctcaagtaagggaagcagaaaaactgtatcctaaacagaattggggccaatccaaagaacttaactttttaccaacctgtaagtttttttttttttttttaaggataaaaggcaaatgagtctattttttagtttcatctcaagataagctctactacctgaagaggtgcttttaagcaattctttagagttgacaacaggcctgggaacgcagaggagaaaaggctaccttgttctgtagaaacacgaaaggcaggtcgtgctgcagcctccaagggagcagtaagctgggctttgttcttttattctgggtaagaagttagagggccagagacattaaattatgtagatattttcatttctttttctttccctcctttttttttttgccacaggaataaaaagtttttgttcttacacaattttgttcttgacagtttaatcaataaaatgtatggcagccatatgacatttatttatggtaatgaaatggattcccatgatgtaacctccttgcctgccaggcgttaatggactcccaagtcacacctagtacatttaagtggcggtgcagaagcatggtgtcaccaaggtgaagggaccctcagaagcatttcctacatgcatgaataccttagaaaaacctcagatcctcagcagacacacttccaatttcagcatgatttagcggtttataaaaacatcttacctcttccaccaacagggatttactttaagcttcatttcaagccttttatgaggtcgtgctccatcagcctctcagagctgcagtggctgatacattctgatgaggcattttatgtgatggcgtggcacttttggtaacaggtgttctttttctgcaaaacttcatctaaaatgaacatgaacagacctgagcgctcaggcagttctccagtgtgcttacagctgttgacgtgcggccggtcatccctcctcctgcctttctgtaggtcggactgaagctctgaaacagcctgtaaacatcctgtgtggaccacaggcctgtatttctgttgggcctcctgtttaatctcgactttgtattttttttatatatacatagagacagggtctggctatgtttccctggctggtcttgaactcctgcctcaagcgatcatcctgcctcagcctcccacagtggctttgtgagtttgctctttggcatttccatccttcccatgggcattccgaaacaggagcaagtggctctttcgttgcaaatagttaagtcaggggaactctgtatcaaaggggcactcccgcatgtgcattaaggaccacgctccctgctttcactcacagcagcccccatgccatgactgttcaccagcagctgcagcagcagcctgaaagacaggggattatatccacagaggtccggcccagtgtctccggaatggacagcccccttgcgagaggtggcagggagagccttgcccgctgctcctgccctctggcccctgccagccctttctctgagcctcctgcccacaaatcagggctgggagacaaatatgcacatcctgcacagagctgtggatagagcaggggcagtggacatgcggctcccctaggctgtcctgtgctgacatagtgagtgctgtcatgtgcccagcacatcacatgcccagcacagtgccttgtcagggtggccttgtctctagctctgtgctgccctcagcacaacggcctgctcatagtgcctgggagactcgagatgggagactcatgtttcgggggcaccaggatggagaggactgaaggaggttgcagggtgtcagggttgaggacacagccctggggcatgtgtggatgaaggggcacctgtcttcacattcagcccttggtgggctcttacaagcacttcccctcctgcaaaaatttgatgaaatatcaaaaaagcctggacacatttactttatttttaattagagctctttcaggattgtctagggaagtgcgttagttacttaaagttctgagatttccttgatcattaatcccccaccaattcaacggcccccaagctcttcacctacctgggactctggaactctccacttttcactgagtcactgcctctgcagctgtcaacctccttccaccgggcccctcctccaggaaaaaaagcagcaaaataaaacccaatgaagatagctttgcataaaatccgggattctttcaatgtagtgcgtctgatgatgctcagatagagttgtatggcaaattattgaaaaatgcctgcacaccgatgtccttgtaatagagattgcctctcacatgaatgggggctgaggaaggcacctgagagaggattcgggtttattaggatttgttgtaatcagactagcaaagcattttcactgtgggccatctgtcagcacatgtaaataggctcattttataagaccagatgttctaacagtattcatttgaacaggagtctacctgttctttgattatagtcagttatgtagagaagcgattctactatattccaaaatgatttctctttggcttttaaatttttctggttgatgttttttgtttgtttgcaccttatttacagcataaggaacagagatctggattagaaaccagaaatctactcttttttctacttcaccactaaggaatttggggtttggtaaattatcaactatcactggccatggtatctccaataaggaggtcagacaaaatgattcccaaggattctgccagctcctaagtctcccgttttaattacggccctgaggaaggagcatcggcctcaccgtctgcccgcttcaacatcactgtcctggcctcgggttctttggggtgagaacagggatgctatgcgaagcccacagcttgctctagggagaagacatacagaagttctgaggaaatgccacactcagcagatccttaactcttctcttcctttctctcaattgtgaaaaagtattttaaaagggaaagtactcgcatttgttgattagttggacttttttgagttcttatgacctgcttgaagcctactaatgtggagggcagcctatgatgaacaaattcgaaattggtgaggcccaagacagagcatctccaggtaaattccacggctcttctctcctgggaagaccaaccccaaaggatggcgagcccacctcaacttccatcctcgtgtccaggtgatccccagctctccttgagtcctcgtgcctgttcttggggtgagttgagtagaaagtaagagtgctattgaacagttaggctttggaaacaccctagtgcttactagctgtgtgacctgcagcaagttgcttagctttcctaagaacacactttcttgtctgtaagatggagatacttgtggggattacatgagttgccacaggtcagtgctgagcccattctactgtatacaggaggctcagagcaccgtctgcctatggaaaggtcccactcagcctgagaaggccctcccgctgccctgctacaggccttcagggggactgagcccatctgcggggacgctcaccaggggtgtctactattctttttattcagctcatccagaccttgtggttacaggccgacaaggggatgtgctttctgtctctgacaacactgccttgccacaggcatccgtttctccgttctgactcacctatgggacagaacccattcccatcagtaacgataactcacttacagtcttaggagtcccaaaaagttgcttgggttttagggggtgggggatgtgtgtgtgtgtgtgtgtgtgtgtgtgtgtgtgtgtgtgtttaagttttccatttggttaaagccccctcctcatgtgacgtacacacagacacatttttagcacccagctttagcccataatcattttaattcgtctgacaggagacattttggacagaggcccctcccattctcatactgtatgagcagctgcctggcacctgcatcttgtcccctgttagaaaaatcgagtggaatgattctgtcaactagatggtgtcacatatgcaggacactgagtgctttaattaaattatgacagtttcaggaaaccaaaaacaactctgaagtggcaagaaagcacttttctttccttagaagattcatgggcaacagaggagagcagtgctcctggccttgcaatatctcagtttcttttaactgtgccagctatcttattccaccaggaatatttaatatccacagtatgatgtggcttttacaaaatcctcgtgatattctttgaaactgtctacagtgtctgtttaaaagtcaataatgttaatttgtttgataaatttctacagatcccaaccctattaagctgttaactgaatgctcctgacttttaacggatgtcttaaggattcaatgttgctaaggggaatatagtatgaagtgaagtagactctttggaacattgtatgtttaggcataacatcctcaattggaaggaatataaaaacacagtatgacaaactggaatcatgagggtagacttgcaatgtattcagcagagaaatttatttggcaatcagaaaacaaagaaaaccaactaaattatctcctttgggagtgtatgtgtatgtgtgtgcagtcagacatgcacacaaatacacatgcattttttctgaaaggtatttcatacctttacattttccgggacaaatatttctgttttaatttttattgtgccaaatgaatacagtattgtttgtacagcaaagcctggaatagaaatttaattagataatcataggtctaacagagagagacaatgatctgcaaagcttctgatatggtttgactgtgtccccacccaaatctcatcttgaattgtacttcccattatccccatgtgtcatgggagggacctagtgggaggtaattgaatcatgggagtgtttacttccatgctattctcatgatagtgagtgagttctcacgagatttggttttataaggggtatcccccacctttgctctgtacttctccttgctgcctccgtgtgaagaaggacatgtttgctttcccttctgccatgattgtaagtttcctgaggcctccccagagctgtggaactgtgaataaattaaatctctttcctttataaattacccagtcttgagcatgtctttattagcagtgtgagaatggactaatacagtttccaatggtttatagaatatttagaaacagatacatttttcagacaactggatttattttgacttctattatttcaaaatgtgactaaaaacaaaagtgaaactacttttttctaatttcatattaaagaaaaacagcaagatcaaatgaatcaagatgcaatttcacccaaatgtcatattaagtaaaagactagataacgttttgccatttacactatagttacagatattttataagatgctcacagatgcctgtgtctgcctgggttgccatttatggggttttttttctcatgtaaatcctagaataacccttgcaattaaggacgattcttaccacagcttttgtaaccttaggccccatctatgctaatgaacaaaaatgtgtgacgctgtgactatcattaaaactaaaaagaaaatttgaaaaaaataaataagacctctctgccatgttgagccatgactcatcagttccactggaaagtctcttttaattggaaacaggagctgctctctgacattggtgcacagtcttggtttggcttattttaatgcactttgaatgctgaagctatcaatttgtacagaccattttaatgtactgctggggggaaaagaactcaacaagaaatagttaacgacttacacatttttttattagtttttcttcccagatactttctacagtcctaaatgggataaattgggtaagaatgcatgtcaggatatgtttttatttcagtggctgtgtttagctatggcaaatttccaatgaataaaaagccctgaggaatgtgtgtgtgtggggtgtgtgtgtgtgtgtgtgtgtttgtctgggtgtgtgcgtacccctagcaactgcatatagaaaatgaaatagaaatgtaagaagaggaggatattcctctaactacagatagcaagacatttcaaaaagcgtttttatctccccattgaatgaaaactgtccaataaattcctcatagcctgaagtcatcctcatattatgatggatacatttttaaataaataagatgccttatgccataggcaattatttttccagattattttattttctatttacactcattgcttttgagggcctgtgatatttgtgccatggatttgttgcacctgtcacttgacactttgcataaaacacgtggcaaagctactcttctcctgtcttgtctcttaccagtctgactgagctacttgtgagtcttgcatgatttactggtactctagtgtatttcgggtcttgtagagcttattggtactctagtgctttgcagatgttaaatgcttggtaaagaatttgtttcctttacaaccatcagaaaactgtttctcagaaaaaattctatctatggaatcccacaatgttgaaggctttcagtaagcactagctcatgcatggcacatggtgggcactcctgtctgctacggcagagttattctgatgtactcacccccaatcaaccattgctgggctcccaccctctcttcctcttccatggctgtggctgggagcacaaagttccaagagggtagcaggagcagcctgcctagaaagcgtggccccacccttctggggtagtgctgcccgcaaacacccctggggatgcaaacagcccttaaaggattgtttttgtctgtatcctattttatctgtgactaacattttggaagaaaaccgtttttgtatttagacactcgaacttcctgtgtcatgtggttctttcccaagtggttgactgtcactgtgtggtcttttacaagccctttgctggcagagaaccacgtgtcttttttgattcatcactgcttctcttcctgagtgcctagtctagggccctagacatggtgggggacaaacatcttcactgatgatgatgatgacaagagaaaaccgtggatgcctgcggagagggtatccagagagcgccataacttaaagatgatgaatttgtgaaagtttgaatttgactctggtaaatggcaacacactggtacttctgaaactgctttaaaagacatcttaaaacaatgtaattcttggaagtacaggaagatttaagatactctctgcttttggaaactcattaaattaaataaatttggtttatttaatttcagttctgaaattctattatgatgacagtataaactatgtcaatggtaacttccatttattggggacataccgtgtgtgtcacccaagtgccagttacttcaaagcatctcatctacggctctacagggaagctgagcctcagagagttgcgctgattggccacgttttcaaactagggagttattggtgggtgctcggcagttccttgggtagatggtaggtgttgtcagaccttcaaagctcaatttttcagaccctaaaggctctgctttcatattatattatgagtttcccaaggaagagtgggacttactctagtacacagtaaaaacctatgccttttcagggtgaaattcaatcaaattgaaaattgaaaaggcttctgttattatgataccgtgggtgtgtaagcacaatgaacgctatgtgagctcattgacacagctcaactcagggtgcaccaaagcttgtgaactccttcagtgaaaaacctgaaagcatttcacaaacccttaagctagagactcagacctggcgctattgtcacagagtggaagcagagtgcctttgaaagggcttgtcaacaaagcttttatcagcattagcaaatcacaaagatgtgggtcactaggtaaccactatcgccccaagattttaggtctgctccactcacattaactggattcttcagcacgagcttatgtgcagcatcttcctgaagatcaaattggcatttgctaggtgggtggggaaggaggcaggcagagcgagagtgcggaggatggttgggtgagaataccaggatggaaaacattaaaaaagcgtccgtggttcagggccagcctgggaagggcaagacaggaggtgggaggttggcagagtcatgtatagggtgccttttgtgaccactggataatctgacttcacgggtcaagtagtggaggttttaagcagaagggctaaatgtggatgcctgttaaacggtgactgatggaatgtggagcctgggttgggagaggtgaggtgaaagggaggggtgattgggcagcaactgccggggtgcaggggagaggcttgtagtgcggcttctgaaatcgctcctgactgcaccctaaccgatgtcagtacctcctcccttgcttctcagttagattctgctggctgagagcgttgccctaaacttctcctggatccacatcaccctgttcatgtctacaggagtcatttttctgaaacaccagtctgatcaggtcccatttttgagcaaacgccttcaaggagtctgtcctgcttcctgaacaaagcccagatgcatgagcatccctagcctgccttccccacctcttccatcatcccttgatccagtccatgctccacgaagacgccattcctcggtgctggttttcctcagtgcctagtgtcttccagctctgtgtctgccttctgcactcctttgcctgcccattatgtttcagctcccacttacaagatatcaattattgaagatttcccgtaactataaattacttaattaaagctgtgtgtcctgcgaatggttctcttcattgcctgctcagcactctggttatctgcatgcatggtacactctcattggcttcctgcctcaagggcctgcctattacgcgcctctacatccccacagggccaaatgtagccctgcgcgattctgtctgttgaatgaatgagtgaatgcattaattaacaatgaacggtactgcagtaagagctggcgcagctctggagatgtcagaccccctcttctaagtgctatgtctctacttctctacaaaggctggcttgtggccttcttggctagttggaatttaatcctttcactagcaaatattcaagcactaaatgtttacccactgctatgaactgaaggtttgtgtccctccaaaatgtatatggtgaactcctaaccctcaaggtgatggtattaggagatgggacttttgggaagtgattaggtcatgagggtagagatctcaggaatgggattagtgttcttataaaagggaactcagagagccctctcatcccttctgccgtgtgaagacacagcaagaagacagcactcatcagacacagactccaccatcaccttgatcttggccttgcaacctccagacttggagaaataaatttccgtggcttataagccatccagtctatagtatcttgttacagcaggatgagcagactaagacactcatttcttcaaaccaaattaattgaacagccaaattattacactctttattggactaaaatcatgtaaatgacattgattttttaatctagtttttctatagaataagaaaaaggagagcaataaatcaatatttagaagtattgtatacttccattttccaacattactctaattgacatgatacatgacaccatcatgtttgtttgtttaattatcagtttgttttggctaataccgattttgcagctgcccacaaagcaaatacccacaagccaaaaaataaaaaataaaaaaggaagtgtaaattctcagagacattttagggcatcataaacccatgaaacacaatttattcctaagtgaagtttttaattgaaaacctccatctttgtatcattactgaatgaagggcaaggtgatgtagcagaaatacactgagagttatcctagtcaccctggtgcattggaagcagtcatagaacaggctcatctctgcaccaatggggtccacacaaaagatgtggccatttgctccctgaattggggatcaaacatatcaacagctaaagacatgaaacaccactcattctccccaaagagcagcacgtcttttggtgtgggttccacccatctttcctagaactctccgccacaaataaagacctttggaggtcttctcagtgtttgtaactgactgtctggcgatgggctttatgaaagcatttgatgacacttgctacactcctcttgttctttatagtaaacactgtttttaatccattttaagtagcatgtaaagtccaaggctgtacatcacatgacacagtgatgtgtgtaccatattccatggtgttctctttctggtaaagtaggtagagttctttcagaaaataatacgtactttagttgccctttgattcagaaaactgaaactttgctgaattatttatcaaaaaagtataactttattagatcacataatagtagatcctatttcattattggtaagatcatcttagcatgactgataaggcagtcggggccctctgtttcctaggcttttctccgatgctgtacctccttcagcagaatgccttgagaaaatgcatattgtggtgtgtaggagattggtcagggtggtgggaacaattgtagaaagatgcaaaccttggaaggccaggggtttgcaaagcttctaaagaaaatttggctgaaggcagctgaattctcttaagagcttaggttaggtaacaaggggatgtaaagaaactgatctagataagtgagtttacttaggccccagaacctggcctttaatcgtctgcgagcaggactgctctgggtggtggggggagggtgaccatgttaattatccacaagtgtgttgactcaaagcctttgtcattaaatttgtgctgaataaatgcctgcggcaccagccagccgtggctgctgactctttacagtaccctccttggggtctgtaagcggcccggttccctaacccactctttcactagatatctgtgtctgagtgcatttgttcatccatcatttggccagggtctgcgggtctgacccaagagtggtgggagcagagcctaggctggcaaagctgtaaatatcagtggatgcagccagagtttggcttctcagctttgccggcatcctccagacacgctccgtgttctttcagtctggcaaccacatgtgccctaggactctgaggtcagcaagcacccagttgaaaggaaaaaatatcagtgtgttccctttatttttctttaatggttgaaggaaggactggcgcccactaacgggacctgaagcatcatcagtcactggcccctgttcgtgtacacatgggtggtagttcggtctgcacttgatctgtgtcacactgtgatgctttccagaaccatcctttctttggtaagtgtagtagagagtaaaaagccacaggaaatctgaatcctaacagccgcacagccagtaagctggttacgccaaaacaggctggttccctccttattcgttcaccaaacagtaaggagttggagcctgccctgtcctgacactgtgtgcacggcgaggaatacacagtgaaccgcaccaggaacatataggatcttaacttctgaggaatttgtttagcctgtctacggcccagtttcctcatcaggaatgaggaaattagatcagatgatgtacagatgtaaactgctgcttttaatcagcctttaattttactttatactgtaatgaaaccaacttcttatactggatgactttgggtggggtcttattaggtggtggccagacctttggcctccaactgctattccacaggccctttgtaaggaaattttgtgactaagggaagggtatcaataaacctaaggaggcctggcctatgaataggcctgagcagaaatgttctggcatttttaaattttacacttgtgtgctgagccctgagctggcaatttgtgcacatgattgcatggaaatcttagcacgagtgttagatgttactctcccctttaagaagtggttctacgtagccgccacattgctcctctgcgcttacccctcaacgatgggttatatgcagaagaaataattgagaaatcatctactttattttttattgattttttaaaattatactttaagttctagggtacatgtgcacaacatgcaggttcgttacataggtgtacatgtgccatgttggtttgctgcccccatcaactcgtcgtttacgttaggtatttctcctaatgccatccctcccccaggcccccatcccccaaccagccccgatgtgtgatgttccccttcctctgtccatatgttctcattgttcaactcccacctatgagtgagaacacatggtgtttggttttctgtccttgtgatagtttgctgagaatgatggtttccagcttcatccatgtcccagcaaaggacatgaactcatccttttttatggctgcatagtattgcatggtatatatgtgccatattttcttaatccagtctatcattgatggacatttgggttgtctccaagtcttcgctattgtgaatagtgctgcaataaacatacatgtgcatgtgtctttatagtagcttgaaagtcatctactttaaaaagggcataggacttttcctggaaaaagacatttctaaataagaagtgttgaatggcataatgtattctaagaaagaccagtgcagaccaacttgtttatttcaatttatttccattgtcttattttccaaatattttgtgttcattattaatagaaggcaaggcttctgtaggaattcaactatcgtatcttccagctttcttctcaagcactttttagattaaaagtaattcaggaaaatgtttttagtagcagcatcattcctttagggaacactttttaataaattatcagaccaaactgtttaaataaaaatgatattagtagaatgtgtgtgtccatctgcaaccttgagtttcctgtgggatgaaaatgtatttcccaaggtctcaaagtcagaggcatgcgattcctatgggaaacagaagcgaatgtgtttttctcccagtgctaaccttgcatgattgatcataagagctgtagatttattctaattttgcttataaggtttttttgttgttgttgcctttctttgaagcatgaaacactgccagaggcaggaacccgggcttaatggaccaagagcatgagctgagagagcatctccccagtttatattcatttggcaatgagaaagtattttaatgttaacacattatgttacggtattgtgaaaacaaacattttggcttaagtacagtagggattcttgctttggttattccaaagatcatctcaactcttctgtcttcaggaaagttttaagactcgtttcataaattgtagtttagcctttttattagaactggaaatagcttttggcgccactaatgaattttatgtgtttctgctggtgtccccaaagtaaattactgtaactaatgtggcactgtctctttttgtaactgttagctgctgaaagcaaaagagaaatttgtctaaagtcaaaatattaacagttttatttattacaagatgtcaagaggaaagagtataatttctgcggatttgagaccagactgaggcctttcataatgaggcttttcatagtaagacttccttcccgtaattcaaagaaaagtgaaaaattaatgtgttgtgtttattatcaaatattagatgaccctttagtagaagtcaaagcagccattaaattagccagttcaatataaacatacatatttcttatttcttttaaccgtaaccaaatgtttactgaatattaaagcacagtgcaagaaaaggtgctttcttagccaaagccatgttttctgttttacttatgtcttcattctttcctttttacccatttttggctcatctgcaaaaccaatgtagtttcataaaatcattaggaaaataatgggtgttagagagtatacacaggcactaaggtagttatgacaaaaccaaaacccacatgactttcagattaaaaagcaggggcataatctaatattttattcaagagctctgttgacattgcaaaaagataacaaatgcttgatttggataagcttttcaaaaaagcagtttttaaaaagctgtctgtcgctcccttactggtctatatttgcttacagttgaggataatatttatactgtttaaaaagacatcctgaataatgtgacactggaagtgtatatacccatatttttgtgttgctagggaatactacaataaaatcctttttgtatctattatttatgcattcacttacaagacttatgtctgtatatacatcttttttaagggaaaacatggttgaagagaggcagaaaaactaggatatcatagtaggaagcacaccagagagccagaatagggaaagtaatgggagtcccagcttggggatatctcagacttctgtggttaagggtcttggcaggtgccctcagtggactcacccataggctctcgagtgttaactatggctttgtacatgattgtatttttacaattttatacacatttttctattatctttttcttagaaacaggctggggctcatgcaatctattgtaaatagctatagcacatgaaatagacagcctaagaaaaagcggaaaagaaaagagacattgccaactcagatatgcttttgccaagacaagtgagcaacgcagatgagccacaagagcagatgatttccaaactgcataggtttgatgtaggtgtgattctttttcagtttgttagcaccaagaagtacatagcattctgagaatttagtgttttaaacagaataataagtcaccttgaaaattcatttcagaaggaacaagaaaattgtcaagttctctgatttcttttgtttctccaattctttctcactcttcctcttcctcataaatcaactttcccagaagcctaaagttaatacaatcccaggagagggcatgaggtagtggcagctctggtcagataagagacagaagaggaacagaacctctctttcaggctcacatggactgtggggtggagggaagacctgtgtccatgacaagaaggctgcatagagtgtgggggaggatgagaggtgagggcttgtggctctgcttcctgctgggggctgcagcagtggccaggcaggagcacagtggcttcaggtagagaatgcctgggcacagctcccagaacctcctttaggggcctggggaggggcagggaggtcgctggaaaggggcaggcctggtgctggctactgagcaaacggagcctaccatcagagcctacggggcagacctgcgtgcccaggaattgaatgggaatggcggccagatcttcagaggctacacagccctaagcaaagagagaactttcccttttcaaagaagttagcagccagagcaggtggtgacagggagaccactactgcagcagctggtgaggaatagagggcagccccccatctgcaaacagcctggggacccctcctctcactcaccatgaggacccagtcaccaccttggaaaggaggtgcgaggagttggagacggggggcctaacaggtaccaaaagcgctcgttacaccagcagatactgagataggcggcatacacgtggtaaggcatcctctctggggagaaaaacagagggtggcttaagcggaaggtgagatcagatattgaggaaattaagaagtgacttttttttctacaatggaatgtgatgtgtgaatttgtcacttggtaacatactaggagtgagtgtgggtggcctatgttgtagagcacgtctccttcctccttgattcacatcctttctcatttatgggtgaccagcaaggttaactagatcagtagctttaaagttctttcctatgaaccaaaatgtgcggctgtaatggttaattttaggtgtcgacttgactggattaaggaatagctagagagctggtatagtgttattttggggtgtgtttgtgagggtgtttccagaggaggttgggatgtgagtccaagtggattgattggggaaggggaagatcagcccttaatgtggacgggccccattcaggctcctgggggcctatatagaggaaaaacaaaggaaaacaaattagtttctctttactggagctgggatacactctcctcctcctgcccttggacatcaggaccccaggacccccagccttgggactcaaggactttcatcagcacccaacccccaccagcctcagactgagaattacactatcagcttctctggttccaaggttttgggatttggactgagccacacgaccagcatcccagggtcttcagcttgtagatggcctgtcctagaacttgtcaacctccatcatcacatgagccaattcctctaagaaatctcccctcatatatgtatctttatctacctaaagatctatcctattgcttctgtctctctggagaagcctgactaatagagtggcacatgacagacagcaaaaccctggcccctttgagcctctcccctgcaccctcacccaggctgtcaggggcattgatggtaagcatcaacagaagaatgcagaaactcaagtgagcccttgaagcaccgaacataaaggtggacaggaggcaccttgccagaatccccctggatagtcatcggaattatacagcctatcctccatctcactgccttccatggtgaccatttcctggttgagaatctttgttgaaatgaaagagatgtgctgataaaagaaaaagatggggaaacttctctgtaaaccaaagacacgttgtctctggcccagtgcttgccaagaagagcttgaaggttttttaacatagatgaatcaaaacaaaaattttccttccatgactgtaggttgttcaaatattcacgcattggatcccttagttactatcctgaccaataatctatgtaaactctagaagttggagtcttaaagttgagaggtaatcctgtccaggaaatgtcgatgcaaagtggagattcggattcctctgatgttcctgtctacacagtgagaggtgatgctagtagtggtttcttccctcttatccctgaattctgtcctccttccattccatgtgatacctacatccgacataattcctatcaaacaaatcaattcagtgagaggaactaccaaggttcaggtcgagaaattttacagaattccttaacgtcattcattttcctgagaatggcgaggaagaaggtgtcttgggacaatgggctgtacagcgtgggagtcaaggatctaaagccaacaggaccaatggaaatataatgtgtaccagctgggcacagtggctcacacctgtaatcccagcactttgggaggccgaggcgggcggatcacctgaggtcaggagttcaagaccagcctggccaacatggtgaaaccccatctctactaaaaatacaaaaaaaaaaaaaaaattagctgggcatggtggcatatgcctgtagtcccaggtacttcaggaggctgaggcaggagaatcgttcaaattcaggaggtggaggttgcagtgagctgagatcacaccattgcactccagcctgggagacagagcaagactccatctccaaaaaaaaaaaaaaaaaaaaaaaaagaataatgtgtaccaattatacaattatagaattgtaagctttctaatagccacattaaaggtgaagttaattttaataatatattttatataacctaatacatccaaaatattataattttaacatgtaatcgatgtaaaaattattgagatactttctgatttcacacagagtcttcaaaatccagcatgtatttcacagtcctctctccattcagcatagacgcactgaaataaccacttgtggcttgcagctaccatattggagggtacagttctagactctgctgtctcagagaccccaattcaagtcaagggctactgctgcttcataccaagtgtgactggataaattgctctctcagcctcagttctctcatttaggaaatggtaatagtaatatttcagggtcactgtgagatttaaaataaaactatctatacaaagagcttaaactgataccaagtaagaaccctgtaaatgttagttattgttatatagatatcattattaccaattttatcatatgaaaagtttatagtgtaacaattattgatagacctattgaaaaaaataaaaaacttctgctgtaactaccattacctggatatagaacagtaaaacaggaaagtaaggagaagaaaaaaaaaaaaaaagcagcttagcaaatgactttccctatggtggccttagctactctgggcatcgagattgcgtcactctttttttttttttttttttaatgaagacagtttttgtaaaggcttgctttacaggcttgccaaaaattcttgtgccggtgaccatatgtctgtgaaaccaggcaatctgtgtccttgctaccttgtagatcttcagcctttttgtgattaacaaaatgacctttcagacccggcggattcagaaccacttcaggctctgccaggactttctgtctcttccaagtgaagagcatctgctgccctctgccgaaaactgctgctactgtggctcatttttctatcacttctgcttcaccagaaccactcaagaatgaagatgaatgcgaagtcagcttggcagctccatggcgccctttgtggtttcttgacctggtggctaaaatccttcctccagtgaaaaacatttttagtatctttaattacacttagtgaaagtaagacacgagtgcggttttaatcttctagatggtcttttggattaaaattagatttatacatttgcataataaaagtaatgttgtgaaagaaagcagtttgagtgtgtgagagataattgcatctgtacaagctgtcttggggcagctcttatggaactgggctcagcattagacattataccactgtagcattttgcatttttatgcggcagtgcaatagaatttgaattttatgcacaattagtcttatattgatgtattgtttgtaggtaggtttgggcataatactgagaataaacctttagtttaattttttggtatttttctggaaaaagaaaagtgagagagaaaaggaaaagctggggaaaaatttgggcaagcaaaaaaaaatttggacatagtcttttaccttgagagagtgtctgttgcattcaaagattctgtggctttccgggcaaaacacaaagtacttcccttgtgcattgcttattgaagttgttcatatcctggggcaacaaggtcaggagagggaaaggattatcaaaccaaataactccttttctcaaagcagcagttgaaaaatgggagctgtgcttagggaattaacgagcatgggatataaaataaagttccacaccaaacacttcatgtacgataggaaaaaaatatatgttgcagtttgctagaacatgtgtagtaaatccaaagtaacattgattaagcaaattgtcatgaacacagagtagttcttatgatcatacataattccaagcttcagtgtggaagtggagaggtacagcacccgtttggtgtcccatacactggttctacctgcacattttggtcagatttaggtgagccttaaggattttactttctcacagtctttttcctttgttgtaattcattgatgagtacattaaagcattttctaatagacaaggaatctaccgatttaacaggaaggcccaggccatatcttccgattggcagttctggcactggcttcctgggattgtaataggttgccccccatcccatgccatttcatatgtaaaacatgtttgtaccttcaaatctattgtataatctattagcttattcaaacctccacttatgttggatatgagaaacacctagctaaaaagaaataagaaaaaatataaataccacaaacccatctcactaaagtttgtcattatattcctccctgaaaactctgtggtaatcacacagtgtgcaagttcctggtcccatacactgtatgctggctttacagtaattgagtctaaaacctcaatgagtctgttttaaaggtatagcgaaatgtagattgttaataacggagcaagtacattttcttctcatcagcattttcctgatttgccaatgcagtactaaaaatattttaagtaccaaaagaagcttctgcacacctaaagaaatttatcgtcagagtgaacaggcagcctacacaatgggagaaaatttttgcactctatccatctgacaaagggctactatcaagaatctacaaagaacttaaacaaatttacaagaaaaaatcaaccccatcaaaaagtgggtgaaggatatgaacagacacttctcaaaagaagacatttacgcggccaacaagcatatgaaaaaaagctcatcatcactggtcattggagaaatgaaatcaaaaccacaatgagataccatctcacaccaattagaatggtgatcattaaaaagtcaggaaacaacagatgctggagaggatgtggagaaataggaatgcttttacactgatagtggaagtgtaaattagttcaaccattgtggaacacagtgtggcaattcctcaaggatctagaaccagaaataccatttgacccagcaatctcattactgggtatatacccaaatgattataaatcattttactgtaaagacacatgcacacatatgtttactacagcactgttcacaatagcaaagacttggaaccaacccaaatgcccatcaatgatagactggataaagcaaatgtgacacatatacaccatggaatactttgcagccttaagggggtgagttcatgtcctttgcagggacatggatgaagctggaaaccatcactctcagcaaactgacacaggaacagaaaaccaaacaccacatgttctcactcgtaagtgggagttgaacagtgagaacatatggatacagggaggggaacatcacacactggggcccgttgggtggtggggggctaggggagggatagcattaggagaaatacctaatgtaggtgacgggttgatgggtgcagcaaaccactatggcatgtgtatatctatgtaacgaacctgcatgttctgcacatgtatcccagcacttaaagtataattaaaaaaaaaaaaaagaacacatggaaaaatgggtgtgcacatcactggggacattttatttttacacactaattttcccttcagcagtcctaatagtggtttaaagtttaaaagggatgggatgagtccggcccctccccttgcagggagagcaggaggcaaacctgttgtgttgtgttgctttcgcaaatgaaataccttttactctgagctgcaaaggctaccaaataaagaagcacacagagctatgtgtcaggagggagtaaaaatgaacagagcaggacagggagttcaggcaagttgacaggccacacgagagttcagcagagcatcaaagtcagtgcatcagcagcaaggggtggtagctaggaggagggctggggagagagagcggccagaagagagacgggagaccctgagggagtcctggtgagaagtgtgtgttaccattcaggctattggaggccataagcagcacgaacccaactacagatgcttacccgagagagggtgattttcctcacataacaaaaaggtcggggtacgtggtcctggcatggattcatgatgttgtgtgaaggcagctcgtctgcagttctctccccctttgcttcatagtcaggtccacgttgcagccactgcagccatcagctccccattgcatgcaggaggagagggaggcaaaagcttccttaggaactcactgcagattctgccctgtggcattgccacggttgtatcacatgaccccctttatggaaagagagcaaggcatggggccggagcaagggtcctggcagcccacgttgctgccacagcctttggctggctggctgtttgccggtgcttgtggctattgtaacatagttggatgcattggtagtttagtggtcattcaggaatcctgaaatttcattcttctcttcatcgacactctgctgttttttcctagctaaaatttggagctgagttttatgagaacagccatgaaagtattgacatatttataccctgagtatttctctagaccagatatttaactttcactgaaataaaaaatattttcaatctctctaaattctaccaactttttattggtccttaatattaataatagctttggggttattgtaaaagtgtggatgaggagatgaagggagggttagggggcagcagaaaggcagcctagaagccccaaaataacacaaaaggcatctagctgtttcaagacccctctctatatgcttatcatctcattaaaagaaaaatgtgtaggttggtgcaaaagaaattacagtttttgctattaaaagtaatggaaaaaattgcaataacttttgcatcaacctaatatttttgcatcttcattcttcaaaggacctatcagactccagcatctcatagaaatatacagtttcagtgttctctctctctctctctctctctctctctctctctctgtcttcctctcccagaaaactaaaaataagaaactgctgttgttgccaagggggatggaaggaggaaattctgggaggtcagcttcagtatccacctccaaatagacacagtggctgcctgcagcctgacatttcaagattgattaagggtgggggaaaggagagtaatattaagcgaagattttgtttgaatttctgtaaatgtcatttgatttctgccacctgtcaaaatttcatgtattagtggcaccaaatagatttgtttttataaaactagacattcccactgtagtgtctatacatatatgtgaaacaatatcaactatttaaatgtctgtattaaataactgataagaagtcttagacacctactataccagaaatattgagaaatacaatctcaacatagtctagatttcagtccggtggtgcacttctaaatagatattaccatagccttctgatggcatacatttgcacatgtgcttactaatgcaaggcatgctaaaagatgttttaaagccttttctagctttgtttaaattatgtttgtctcaaatctgtttctctttgttgttgttgagttgcttaatagagccctctttggtcctcagtgaattggtttaaaataatgtctccatcactaaaaatatttattgtggtaggcagaattgtaaagagggtcctccaagattctgtcctctagttatgccattaaacacgaatgcagctacagctataaaggtcacagacctcaaatagggaggctctccaaactcacccctggagaccttaaaagcaaccagagagatgtggctgaagagaaaggtggaggcatgcatagagatggaggggaagcaggagaagcttttgagacacccctgctggctgtgaagcaggcagggagtacaggtgcctccaggtagacagcaaggaaaagggacctcaatcctacatccctacaaaactgaaatttgctacaacttgaatgagcttgaaagcaggttcttctccagagccccacagagcagtgctggactttgatcttggcctttgggattctgggcagaggagaagctgagctacgctgtgcccggacttctgaaccacagaaactatgagataaatggatattgttttaagctggttttatggtgatttattataatggcagtagaaaatgaatactgacatacctcagagatattgcagattcagttccagcccactgcaataaagcaaatccttatctttttgctgggagagggtcttaccttcatgttgatggctgctgactgatcagggttgcggctgctgaagcttgacgtggctgtggcaatttctaagacaacggtgatgtttgccacatcactggactcttttttcatgaaagatgtctctgtagcatgtgatgctgtttgatagcattttacccacagtagaacaactttcaaaattggagtcgatcctctcaaactttctcaaagctactgcttgatcaactaagtttatgtaattttcaaaatcctttattgtcatttcaacaatgttcccagtgtcttcaccagaagtagattccaacttaaaaaaaaaaaatctttgcgcatccataagaagcaactcctgatcagttcatgttttatcatgagattgctgcaattgagtcacatcttcaggctccacttgtatttccagttcttctgtggtttccaatacatctgagttatttcctacattgaagtcttgaagccctcagagtcatccaggagggatgaaattgacttcctccaaactcctgttatgttgatattttgaccttctacaaatcatgaatgttcttaatggcatctagaatggtgaatcctttccagaaggttttcagtgtactttgcccagatccatcagaggactttttatggcagctatttccttatgaaatatatttcttaataagactcaaaagttgaaattatcccttcatctgttgtgttagcaggcatgaaaacattcacctccttggacatctccatcagagctcttgggtaaccaggtccattgtcattgagcagtaatattttgaaaggaatatttctttctgagcagtaggtctcaacagtgggcttaaaatattcattaaaccatgtgcatctgtaaacaaatgtgctctcatcctgtctttgccattccatttatagagcacagtcagagatttcacataattctttttttttttttttttttttttgagatggagtctgactgtcacccaggctggagtgcagcggcatgatctcagctcactgcaacctctgcctcccaggttcaagcaattctcctgcctcggcctcctgagtagctgggactacaggctcacgccaccacgcctggctaatttttgtatttttagtagagagggggtttcaccatgttggccaggctggtcgtgaactcctgacttcaaatgatccacctgcttcggcctcccaaagtgctggaattatgggtgtgagccaccgcgcctggctgatatcacataattcttaagggccctagcatttttggaatggtaaatgagcattggtttctacttaaagtcaccagctatattagctcctaaggagaatcagcctgtcatttgaagctttgaagccagtcattgacttctccatgacatcttcttccaatagaaggctctttcatctacattgaaaacctgtggtttagtgtagccaccttcatcaatgatcttagctagatcttctggatgacttgctgcggtttctatatcagcacttgctgcttcaccttgcactttatgtgatggaggtggcttctttccttaagcttcatgagccaacctctcatagtttcaaacttttgttatgcagcttcctcacctctctcagccttcatagaattgaagagagggccttgctctggattatgctttggcttaatggagtattgtgattggtttaatctcctatccagaacactcaaactttctccatatcagcaataaggctgtttgctttcttatcatttgtgtgttcacaggagtagcattttaaatgtccttcaatagctcctggtttgcattcccagttcacagcttggctagctgtttggtgcaagagatctagaacttgacatgccttcctcaccaagcttaatcatttctagtttttgatttaaagtagaagttgtgtgactcttcctttcacttgaacacttggaggccattgtaggtttattaattggcctaacttaaattgttatgactcagggaataaggaggcctgaggagaaggggcaagacaggggaaggtctggttagtggagcagtcagaacacacacaacactttaccagttcagtccaccctcttatgtgggcacatttcatggtgctcccaaacaatcacaatggtaacatccaagatcactgatcacaggtcaccataacaaatatgatgatgacaaaaaagtttgaaatagtgtgagaattaccaaaaatggacagagactgaaagtgagcacacactgttgggaaaatggcatcaacagacttgctcgatgcagggttgccataaaccttcaatgcgtaaaaactgcagcatctgtaaaatgcagtgaagtgacacacaagaagaagaggtgtgcctgtgctgtaagagagaagtaagttctagacccacagattttgggtgaagctcaagctcgccctgcatatacgcacatagactcacattatttccacgcctggtggttccattgatcatctttccatcacatcttttttaacagccctaattaatagattttatgtactcaattattcattgggattaactgagttgtaaaaccagacaaaaaccacagtggcccctatatttggatggctttagacgtgagaacaaggcttcaagctcctgtttcagggcatcgatagttttcagctgcaaatcagatcctatccccgccctcaaaatgctccagtaactgccctttataattagaataaaattcaaacaactctatctgtgagtgccagattcctctctacctcttcggtgacaccttgtgaccacccctctcctatcacaacctctggccacgtggacgacccttctttccaacacaagcaccttggctctgctatggacaccccggccaagcccaggcccctcctggcatcctctttcctgggcactgtgcacagctgatagcctcccccagaccttcctccacatcctccctggaccaccctggccccattgcctccctggtttatttgctcctcctgttctacttgttacggcacccaatatcaagcaacacaacatcctgggttgtttgaggtgtttattttctcttcttcactgtcatatccctggtactcctcacagtgcctggtccatagaggttcttaaatttgtgtgtgtgtgtgtgtgtgtgtgtgtgtgtgtgtgtattattaatatacatatacatttttcttagttatatattaatatatatttattgaataaattaataaataagtgggtcaatcaaccaacgaaatacctgccctgtttctgttttgcccgtaatttttagaggtacgtattttggtggtgctgaaggaccttacaaaagataactccctatgggcagcgttcagaagcagctcgcggacatcccagctcccggctttgcccccagagtcagaacccactttcccaccacaggccagctcccatgcaacgctgggcaagttgccctctttgtgacacagggacagtgttagtaatgattccttagtgcttttgggatgagttgatgaaataattcagtttgagttcctagcatagtgcttggcacataatacaatttattaatatctttttacatgaataatgataaaataattctgcactctgagtcattgcctcattcaaaaaattttttttgcttattttgtgaatcaaatgatgaccttaaaaatatatcaatgacttttctttgtaaactatggggaacagtctcatagctaattattcaaaacaattcgactcctttgaagctattggaaaagcattctcctttcatgtgcttctggtcctcagtgaaacagcaggttcttggtgactggagaactctaaccgtagtccagcccccaggcactgcgactccccaagctgagtccagcacagacctcgccctgaatctccatgcccaaaacctgcctgttagtagatcttcacttgcagtgttttcttagggttttttgttttggttttggtggaatagggaaaaacaggttcttaaaggaaagttcatgtattatcatctcaggcccagctcaactttgccaaccatctgcccgaagccccatctcctagaagcttttctgttatttaatttcaatatttcatcaaagaaacctcacatttgtcatttagtgttaaatatctgtaaactactcactttccttattcctatagaatcacttttcattcttttgtagtttcaccaaatagttattaagatgccattgaactaaaaaacagtatcattttcttcatcatcaagaaaaaataaaaaaacactgttaatgaactctgaaagactttgtatcacttcaaatttctcagacttatatttaatacttatcaaaagtgctcttagagtagaaatatatgagacactttttcattatttatcccccttgtacatgtataaaaaattaaaagtaaaatagattaagatatttttaacacattcaaaatgcaatctcctagctagctcacttgcagtgtcagaattatggttgtcccataattggacatatgggacctatgtcccataattcagaaactatggtttccaaataccatgctctcaacaagcaagagtgctgaagatgctgcccttagttaaggagtgagcagctactgtctttggaattttcttctaagctcctgacagctattctgtatgtttgacgggcatgtgcaggcaatgacaactgtgacaacattgccacctggatgacaacctaagctgcagcctaattatagtaataataataaaataaatcagtgaaagagcccaagatgaatcttaggataaaaaattctaggctgggtatggtggctcatgcctgtaatcctagcactttgggaggccgaggcgggtggatcacttgaggtcaggaattcgaaaccagcctggcccacatggtgaaaccccatctctactaaaaattaaaaaaaaaaaaattagccgggcgtggtggcacacacctgtaatcccagctacgctggaggctgaggcaggagaatcacttgaacctgggaggcagagattgcagtgagccaagatcacgccactgcactccagcctgggtgacagagagagactctgtctaaaaaaaaaaaaattaaatatagtatgactatccagctatttttttcttactttaattttaactactatctgctaaattctagctatgaaagatcaatgaaggtttaatgctgtacacaacatgtgcctgcaaacacacacacacatccacacacacacctcctctattaaaagcattgttcagactaggtattataattccctttcttatacaactattttatttttcttggatttagtgattgacttggttttttcatttgcttgttcacttgggtttgggtaaagtcgtcattaattcagccccaaactttctaatagaattataaatctcttagtataatcacgaaaaatcacatatcattttctccccaatttttccaattggagacatgcattctgaggtcccactcctcctgaggctgtcaggaccctccagcacagcggagggcactgtcgtccacattgtcccgaatgccaggtttattctgcactgatttttctctctattgtccccccaacactagatcaatggtttgtctgggaatagggaaacctaggtaaggcactattttctttcagaatgttgaaggcattctgttcaagctttcagggctggtggctgaagtccaaggccattctgattcttgttcctgttctcccccagcccatcatccatttgctcactgtgacggctgtccttggctcaggccttcctcattcattgttctgggcctacttatacagtggctccttgaagccagaaacctatgaccttctatactgggaaacatctttgtatttaattatttgatatttttctccactttattttctctttctgggattcctacatcttggatatgaaacgtgttaggtcaattctttgtttttctttctttaaatctcccatctcctgtttcccattcctctacctctttgctcttctttcaaagagatttctccaaacttgttttccaaactgactaaatttttaaaattttctgccgtcatcattttaatatttaagaccgcttctttttctccaaatattttttctttataccattatcttatctattcaaagaaattgattgtagttgagtgtttgttgtgtttgatttttttaagtcttctactcttccctaaattgttttctgtttccttttcagtttcttggagtctcttacctttggtactgaagactttctccagatgtcttgtcttcatttgcttttcattcatactttttttaaaagcattttaaaaaaactgattggaaaccgtgtgcaaggtcaggcttgttaaattctgcatttcacctgagtacctgtagtagagcagtgaacaggatgtgaggaaggggcacacctgcacccaaacactggactatttctagggtggtaggactccacaactgcagatagaaagtctacaataatgtcctgcccagtggtggggaggtgtagggttttattaaatctggatgccgtcagtctggaagggaggcagaacaaaggggttgagctatcaccaatcaacatgcagtcatccatgtaattccctgatttcaataaagcccctcatctcccccccatgctgtgccaggtggcctgagcccagatccactctgtagggctactctgggaaaagaacattttgtcttcagcctggggaagcagggaaagttgccagcttcataggctggggggtgggatgctgtcatcttactgctcactgtatgagattttcaagtacttattctcatttgggccctttcttttctctgaatttgccagggacctggatcctccagtcctgggccttccggtggtgctgcacctaaatggccttgattatgactgaatttcccttctgcagacagtgaggctttagctttctctgctctgctaaatacagtaggttctaccattccatctgtgttctatgatttgattaacatctctcttctgattttttcttctctctcaaactctttgtccttatagatttatttcccttctgcaccaatatcattttagtcaggctttaggaagtaggagatttaaacacatttgttcagtctgccacatggaactggaacacttgtttttcttttttcagttactgtcaccaccatccctactggtcaaaattggaaaccctgaagtcatcccagactccttcttttaccacatctaggtagtcaccaactcctctcaatgctacctactagttagctcttaaatgtgtctcccagcctcccttcctcctgctgtgtgtttagtgtacgctcacatcacacttaactggagagttgagcagcttccacattggccttccaatatcagcctgttcttcacaccaaccctgccattgtgactctaaaacaggaattgatgacattttccctaaaatgtttttatggctcccccagacctttgggatagaaaaacagtctctgtccatgaaaagaaaacacttcattacatacaaaaccttctgcatttcctcgaacccccatctccacctcctaggactaccaccaccacaggcccccaaagagcttatggttggttcctgaggaaactcttggctcagggtgtttgcacacatgtccgcatcttgctgtagagcccctattttctcctctggctgataccataggatgcttttctctatatgccactcatcagagggttgtaatttctgcttggcattgttctttagagagggtagtccagacgggtgcagtggctcatacctgtaatcccagcacttcgggaggccgaggcaggcagactacttgaggccaggggttcgagaccagcctggccaacgtggggaaaccccatctctactaagtacaaaaattacctgggcgtggtggcacgtgtctgtaatcccagctacttgggaggctgaggcaggagaatcgcttgaacctgggaggcagagcttgtagtgagccaagatcgcgccactgcactccatcctgggtgacagagcaagactccatctcaaaaaaaaaaaaaaagagagagggcagcccctttctgctatttacaatggtgtcaaaacatctgtatgacatggctaccactaaaaatagaatagattgctattacctatggccatgctgcattgagcatttgaaatatcaaaatacatatgtgtgtaaatgtatatgtgtctgtgtgcacatgtacattctatatgtacatgtaatatatatgcacatatacacatacgggtacatagctgtatatatgttttctcacaaaagaatgtgaactgttatattttaatgcatttttctccaaagctgcaatgatctaatatgaaattctcagctttgaaaggggtggatggtacacagatcctttgaaaaattacatcacagaaatactgtgagaatgcagaaatattagatgttgaggaactcaaatatgtttctctaaaatatagaataaaatagaatataaatttaaatctgtattttattctaatttatgttattttttaatcaaagagaaaaaagctaatctaagattttcagtaacaagtaaatccctttatggtgtctcttaagaatgtgtcagatttctctcttttttggggacagaatctcacttgtcgcccaggctggaatgcagtggtatcatttcagctcgctgcaacctccacctcccaggctcaagtgattctcttgcctcagcctcctgcgtagctggaattacaggtatgtgccagctcacccggctcttttttgtatttttggtagagacagggtttcgccatgttagcaaggctggtctcgaactcctgttctcaagtgatccgcccaccttggcctcccaaagtgttgggattacaggcatgaaccgttcatgcttgccaatgtgtcagatttctaacctaaacactgtgcattcagagactcattctcatctctataaagtaggatcaaatccgtggcctgaagttgagcaaccatgctgcaagttcttcctccagctgaataaactccatttgacttcgattctggccacccgttctgccctaaaggcctagggagttgttagccgagtagattggaggctaagtttgtcttctgcacccccatccatatcaccatggtggaggctttctgttgtgtaaagaatgccatcctcctggaggcagcttcatgactcctactttgaaaacccgctctagctgaaaggctcaaagttatgtcttaaactaaatggtctggattgtctctgtgttttgaaggtgctttttttaatttacaagaacttgtttagtttcaaatagttgacctctttttaaggttcaaccctggaaaaaaaagaaaagcattgatctctatattaacgtagcttatcatgtgggcttaaaagtctcctgtcttagtccatctgggctgctataatgagatcccatagaccaggtggcttataaacaacagaattttattgctcacagttctggaggcttggcagtccaagacaaagtctctggcagatttggtgtctggcgagggcccacttcctcatagatggtgccctcttatgcatcctcacatagtagaaggggctgttttatacgggtactaattgagatgcatggacactcatgagagacataaacattcagaccatagcttctcccattttcctccttctcttggatttccctttcagctcagcagctcactctaatcttactcatttctaaagacccaggtcaaatttgctgtcctctgtgaggcattcccagagcttatggaaataattttgtcccacatgggttcctgaagaagttccatatatctgctacttccccaaaccccatcaaaatgatacggaaggagttaaaatagtgtaagtccacaagaacacaaagagttagagagaagataaaagtcaggtaagagaggtcaacaaaatttcagaacacagagggaagagtgaataaaatagaagtgttaaaagataaactaaggcgtattaaaattttaaacagcttatgtgcgcaaacagtgatttatgaatctagccacaagtggtcagagctccaccacaggtcattgaagggaaagcttttataggataaatttggaagcaaataaattatgtaattggctaaagtttgaacaattaccttatttggacgattcccatgggaagttcagaacaatataactaattccaagttgactgcctgtgatcagctgagttcaagtttcatcttttaaattagccgatcataggaaatgagtctgagttatatttcagtttgctgatttaggaacccggggttttagagccacctctgtctgatggcctcccatttaattattttcacagaagatagtcaatatggtgccaaaaaaaaatcggcaatttagcactgttgctgctacgcttatgaatgtggatccaacccttaatgttgtgattctcattttccttgtttctaaactaaggatgattcagtctttctggtctactggaaatatttcttgttcaggtcaagggaagtaatgtgggtgaagggctttgaaaactgtgtagacctttataaaaacagaagtctttattagtaccattatcagtctgcctcttactgtacttaaatatttgtttatgtatcccctcaactaagctgtgggctctttgagggcaaggattagatcttgtttatattccctagagttcttagtttactcataataagcattcatttgctgagctgcattagtattggcctaataagttaccaacacattcttaaagtgctctgaaatgcagatctaaatgttgaaatgaagtaaatacaagttatgctaaatttttaagttcagagaaagaaatcctatcttttgagcaatcacttgatgctggagatggctgattatttacagtccagcagtctacagagagcaaatctctcagcagttctaaccttgacacttctctctcacattaaaatattccttgagggacaactcaatgttaacattttgtaaggaaatatagcatgactaacaggccctatgcaacaaacagaagtaagtccaaatgaatgagcacttttatactctcagtaaattatagcagagatgctaaggctactgggagacaagccggtgttgaatttcacttgcacccagttttgttttagtaagattatttctgtggaaggttttttttatagcttaagtaattgatgtaaaaattcagtgtcatacgtagaaatagcacaaattctaattgtgtttggaaagttactttggaagacagatgatagataaatagagagatacattgaatggttggttgattagattgattgattggataaaatagattacatagataagataggtaggtaaatcgataggcaaattagatagatagatagatagatagatagataatctcccctaaatatacttagataaaaatatggttattagataacagctttagtcaaccactgaaagatggcaagtgatacgaattattttacttcatcacattgaattagcttcttttgatatttaaatacagcattacatgcaccctgttaaaaaaataacagtttttagttttgctaaatacattgtgtcttaaataatgatgacttaaaatccactatatgccgggcgcggtggctcatgcctgtaatcccagcactttgggaggccgaggtgggcggatcacgaggtcaggagatccagaccatcctggctaacacggtgaaaccccgtctctactaaaaatacaaaaaattagccaggcgtggtggcgggcgcctgtaatcccagctactcgggaggctgaggcaggagaatggcgtgaacctgggaggcggagcttgcagtgagccgagatcgcgccactgcactccagcctgggctacagagcgaaactccgtccaaaaaaaaaaaaaaaatccactatattagacatttctatacatttccatcaaagaaaagcccaggatctgatggccttattgctgaattctaccaaatacttaaagaagaattaatgttaattctcctcaaagtattccaagatatagtatgaagaggtagggcctttggggagttacaagatcatgagggcagagtccacatgactggattagtacccttatctaatagacccaaaggagcttgtttgcccctttcaccaagtgaggacacaactaggagcactaccaatggggaagaagccttcagcagacaccaaatctgccagcaccttgatcttggacttcccagcctccagaactgtgagaaataaattttttttgtctaagctacccagtttatggtattttgtcgtaatagcctgaacagactaagacataaatagaaaaacaaatatattcaatatgaagtcaaatggtaaattcttagaaatgtaatgttgagtaatttgagatacagtcttgattatttagaaaagattcatatagtttaggatgactttgttgtaagctgacacttaggaattttcaataataaatacactgatgaattatgagtgaatggatgaaagaatgattcccaagggtaactgtaatgaattttttaataggagtttggtttatttttttccctaggagttgggtaatagtggttttgaatagttttctaatttttgccctgacctgtaagattatgacttagctgctttaatagtgtcttctgagaagaaagagagaaaaggggaatcagggaggaagggaaaagggaaagaaagaatgaaataagaaaggaaagaaagacccatctagtaggtgagaacattttcttctttcccacacatatatccccataatatgccttgtcttaggtaaaaagtttaactgaggttagtgttggagatgtagcatcaatctgcattaacaaaagcatgccaattcaacagaaccgtaattttctagagtatattgtatacggagtatattaactaactaactagtactgtctgggtatatcaataaagacatacctagagggtagaaactgggcccaaattatctcttacctaaagtatctaattattatgacctactacttggacagagaatgattaacaaatgcttgttgaaaaaattaccatcagaatcactgactcagtgtgatcccaggcaagcatggatttgaacaggaggatgcagttggaagaagtccacccagatgaatgaggatagaaaaggaagaccgttcagagagggtgatgggatttgaagtatcctctgggagtggaaaagaatataactctagctgatcaaaatgcacaaagaaaaggggtagagaaataacagaaaaggatgagagaaagaagaaataataataccaagtaaggaataaaaattaggctattcaaaatagcaatttggggaacttctaaggattcaatacccagagcttttctaagaaaatgaactgtacaataaaaagaaattatatcattaattgaatgttaatataacagattttaaagaagtggttgaagaaacaaacatggtgttttcacgtgtgcgggatgtttgggaaaattgcaccattgggtctcgcctttgtcatcatagacacccagtagcagaaacatttgagaatccctgtgttgctgtctctgtacattcctcacccatcaacatttgattgttttctttccaaaaataaacgaaagcccaatttttaagaaaatactttgggagtgtttgaggcttttaagaacaaatgagaaatagaaaactgggtagctagcgagagatcattatgttaccccatccctatcccagcactgccaaacacagctagaacaattcaagctgatgggagcacagaaattgctgtaagccaggctttggttgaatttaatgaaagtttacctggtataaagggaagtccaatgccttccttattttcaaatgacatgtccaagatgccctgtctcaaatgtaagtcaactgtaattccaatgaggcaatcattttgctcttgaatttcagaactctaaagaaacgttatttttatcagaacaatagtcttaaggataagttacaaaatacatcttttggttaggttaagtggcaattgcatgttaaaagaatggtcttctcagatccttctattttctatgatttgatctcctttgatctgtctcctcccatctgagtgtcaatgattttatatagtgacagatggaaatcaacattgcactagcaggatctgagtcacaagaatatatccattgtcacccattgtattagtttcctagggctgccaaaaaacaatctgccacaagcttggatggcttaaaacaacaggaacttactgtctcattgtcctgggagcctgaagtctgcaatcaagttgttggcaggactgagctccctctgaaggctctgggaaggatctgctcccaccccttgtctgagctttggtgttgccaggagtcggcattcctcggcttgtggctgcatcactcagacagctgatctgttatcacatggctttgtctctgtgtgtctttgtgtctcttttcttcttacaaggacaagagttatattgtattagggcccaccctcatgaccttatcttaatttgattacttctacaaagattttattcccaaatgaggttatattcattggtacttagggttaagacttgaacatatctctttggggagtaaattcaacccataacatccatggccacccaacatccaaagaaaaaggatagttggaagaagtatgttacaagaagagtttactaatctatctgctgtacatactttcgtaacatatattgttaaatatcctgtatcttatgctttgaaggaagaaaaacacattccatcgagtggatgcttatgataaactagctaatgaattagagaaagataatcatgttttatacaaaattcatataatatagaaatcatatgcgtgtatatgttttgggtttttactccagcctctcattgctaagaaggcaaattaaaattcttaagattcagaatgcttaaatgcagaatgaatgcttaatgtgaccaagcccgtatgttaagtagataactcacggtgatctctctctttcatttacaggtcttttctctctcttataattaacatttggatgtacaaaattatgttccatgctatcatacaattgaatgtttctcaatatagagctttatcagactttcatgctgataaatgcaagtttgtcgtgtatacatctgtttctatgagtttatggcttatgagtttgtatttaaatgtcacatacttgtttctttcacccagagcactaggcatcgagcatagttggaggaccacacaactaatttatctattcattcaattaggaagcttttattgagcatctgctgcatgtcaaacactgtgctaggccctacagatattaagacaatgttattttcctcaagagatttatactctagtaactagttcttaattttgttatgttttgttttgattactgacacctttgagaatctgattaaaaccataggaccttctccccttctgcactaagaaaaatgcacacacagaattgtgcatgcatttaagtaggtacatgaactaccctaactgtgtgtacgcacacatgtgtgtatgtgggtttagaatatgtgtgtgtgtgtgtgtgtgtgcgcacgctggatcagaggacagaccttttatttactcacagaacatcatagcagcaccagtacctcatgcactaatctcccatggtatggtacagtgagggccacatgtgcctgcatgggcagggctttctccccaggagaggacctctggaattatgaaacttggagcttacatagagtaactgtcacacttgtcccttctccactccagagagagagagagagagtcgggggtggagggcagcaaggcaggaagttttgtccgggaatgtggaagaatcttctctgaagaaaggagagaaaggtccccagttttgtcacccctgggtaagtgaatggctgcagaggagatgagcctttacatgtcacaggaacaagtcactatctcgaattccaaggcatgttcaccattcggtcattctttaacttgggttgccagtaatccttactcaataagccctagctatgcagaaatgtgaaatatgaaaatattcatggagcacagcttcctttagctacaataacagaaaacctgaccagctgaggtctgaaacctgagaacatttgctgtttagttatgagaagtccagaggttggcaggtgagggctctgtttaggagctaacacttctgtgaagccctgggctcctcctttcggcatgtgttcatcaccccatgcccacaggtgctgcagctcaagataacatctcatcaccctggaatccaaacaggaagaaaagcgtgaggcccaaagcctcttgttcttttgaatttctctctaggtatcaggaagtgatagactccccagaagcccccagcagtcttcccggtacttttcattggccaagactaggtcctatgaacactcctaatacagtcactgtacacggagaataggattcttgaggcaaactgagattagccatcaattctctgagtcagagagtccctgctgccgagacatggaaggctctcaggccaggtcttgcatcaaatcatcttcagggaagaaagaggtagagaactattgtgtaggcaaagataggagttggtcagcactttcattctcctacaaccattgttataactaatgggcactagctcttaaatgatcagaaaaataatctagtgtaactctccttccagacagaaatgcaccgacttaattatgagcatagggaccaccaggaagggatttagtaggctttttttgtgtgtgctaaatgttcctaggggtttcttgtcgatatcgctgggaccactggtgggtgaaaggcaaggcagacatgaatggaggctgagaagtgggagacaagttgaggaataaagggaaaaaatagcaaaccaaagttggaaaacaatgtcagaaaaagaaaaacatacatattgtgaagagtattgtttaaatagttgttttcctatacaataagcactagtaaagatagaaatcttccaaataagtgattctctgacttttaggtgtaaactgttttagtggtgaataacttttatttccagaaaagtgtttttttttaacctccaaccatagtaatgtgtttctctcctcttgttctgccttctctttagggaaagagcaccttggtcatcattctctagataaaataagcaaaggcagttgcgttctgcctcatgctcaaggggaacgtgccaagaatgtgtcgaaacacaaaaatgagtcctcaaccctgataggtatagcaagctttgtacagctggcagctccacgctgtcagtctccttgcagtccccactcctcaccccgaccccatgtctgcaagtcccctgtccttctgtgtggatctttcagctgtcccctgccaccggccactccacaggacaacattagttgcaggtatttcttgtctttctgtttcaaatgcaacctctgatgtggatttaaagttgtcagtggagttagtcagaggcagcctagagaagtgacccaggaatgttctttcttttttcactttcccgccgtaaattatagcaccacctccttccttttggctgataagcaatcaaattgccataaaggtgatcaaccctgtggcatagtaaagatcactgcaaataatgtgatccccctcccaatgagaggtaggttctacttccctgccctgtgaatttgggctgacctcaccctgcttgcactgagttcagtggaaaaagacactctgccaggcctagctcttgacatgactgtcagcttccgtcttggccttcgtgaagagtcctgggctttcatatgagaaatccagatacattgaggccaccatgttgtcaggaagtccaagctaaccacatggagtgtctgcgtggaaagagattgtgaaaagaataaaaagtaaggggtggtttgtaacacaacaatgggaaagcaggtaaaacccagtgtcataacagaagcctttactttcatacttttcttgagcttgaataacatagctcccctgcctcttgtctgtgtgtatgaaattcctacatctcgccccacactgtgggttcctttggagtatcttgttgtcggtggtttgttgaatgtgagagattaccagaaaaacttccctctcaactttttgccgtatttgaacactgacaacgtgttctttgatgttcttgtaatacatgggtgcaagaatttgtgctgttttatctgacacacaatagaaacaagtatataattattttgtcactactttatagtcacactatggagtcaacaattacattgtaggtttagatttctcacggcattgtttgtccttttgaatagcacaaagggtacccacccaatacagtcacattttccattggattttgctttcttggggacccccccaaccagtgttcatgtagttgaagaacttgtattgatccatgttcgtttaggtatccctgcttctgcctatctgatttgactgtttttcctctctagaatgtataattttgtaatccacttgtttccttattttcttgtttcacttatttttttcttttcttcactattattttattacctataattttcttgcacatgtagttacattttcaaatataaaaaaaccagtgtttttagttgttcagttattcagtcaacttgaaatttcataacttctatgtaaaaatatttatatattttaactgtgtaagtgttatactagaaacaacttaactggtgatgtcataaatcaaatatgtgaccctgtaatgagaggctcatgtcatgagataataaattctaaagcagacagtttgactgaattctaacaaaaatctgagagaaaatatattattgtgtcctacgggtgtcttgatattggaaagaagtgacatgaatttgttgttcaaagggaagaggtgtggcctgccactcttcttgaaagccatcattttctttgcctttgggtttcttgatgtcttctcccatcttgcccacagcctcttcccctctttctttccttccttctctctttccttgtttctctcataagacagagctgggatggggatctgggaggaagaggagacaggctgaggacagaaaattgatgaaccaatttttgttgatttctacatcttgaagagtgttaaattgatttgtaaatagatttggcatgaagtccagcagtcagttctttttttgtttgtttttttgagacggagtcttgctctgtcacccaggctggagtgcagtagaatggtcttggctcactgcaacctctgcctccagggttcaagtgattctcctgcctcagcccctcaagtagctgggattacaggcatgcgccaccataccctgctgggtttttgttttttgttttttttttttagtagagatggggtttcactatgttggccaggctggtctcaaactcctgacctcgtgatctgcccacctcagcctcccaaagtgctgggattacaggcatgagccactgcgcccggcctccagcagtcaattctatcacctccacctatttgacccctgagcatcatgacttggtgtgtcactctctactctccaaacactcaccttcttctcttggctacaactggataatttataagctttgccaatgtggcatccgaagcagaactcctcgagccctctctcgctcttccccagtcttcctactctcagtagaaggcaccactgtccagccggttcctcaggataaaagtggcagcgcaacccctgcctccttttcctttgtctgctccacagggcagcccaccagcaagacctgctggcctcaccttccagcccccaggtgccatcacctcccacctgaccgctgcactgctgaccacaggccacagccagagcctcctaactgggctccctggatcttgttttgctcccccagactattccagagttcagggttggggattggccaatattagcttgaaaccagcctcaccatatattagttttgtgacactgggcaggtttatgcacctttccctgcctcactgtcctcatccattaaatggggataatgaaaatatcaatagccctgccctcacactcaaagcagcccgtaaggactaaggaggtgatccatgcgaagcactcggaacagctcctgggatgcagttgacatgcgatgttattagttcataatgattgtcgttattattagttcgtaattattttctatacagtaaggggacagatcaccttttaaatatagaggattatgggaagatggcctggttatgtaggatgttaacagcagcggacgtggggtgcagcgcatctgaggacgctctgtgcagtcgttacaactcttctgtaaatctcacattattataatgtagaatgccttctaaaatatgaaggctatgacatcactaccatgtgcaagtcctccagtgccttctccctactctcggaattaaacttcaacccttgagaccatcacgatctggcccctggccaggagtcatttccttcaggtcctgcggtgacctcctgcctctcccgccagccctcctatcctggcggcaccctggcccgcagacctgtctgctctgcttgtgttccctcgtcctcctagtgctggtcctggctgtcccttggtctgcacaagggacctccctagtgaagactttgctgatgttccagatcctccctctccctccaacagtttccctgcttcatctttctccatagcccttagggttttctctctttagtttgtgtacttaagtatcatctagtggagtgtaaatcccctgagcataggaactgtgtctaatcgtctgtattcctcttatctagaccagttcctggcatttggattttgtgccatatatatttgtagaaggaatataggcataatcagaacattaatatcatcaaatgatattgatattctttcgtctactagccccacattatataaacagaagagtatattaaagagaatattaaaactaatcaaaattaacagatgggcttaatgcattgtctccttatattttgctcctcagtctttaaggtagaaattcgtttctgcatatccaaaatcctacattcaacaatcatgaagcattacctcaacctagtgtctgtcaaccccctgtatctatgggttccacaactgaggagtcacccaactgcagatagaaaatatttggaaaaaatgaacataaaaaatgacacaacgataaaaataatacaaataaaattgcaatataacaactatttacatagcattgactttgtattagatatacataatctagggatgattttaagtatatgggaggatgtgcataggttatatagaaatactacatcattgtatatcagagacttgagcaattgtcactttggcatcccaaaggagtagtggaatcaatactccttggacgccaagggacaaccgtacaggtaaggcttggattcttaaaaaaaaaatgcatattcaatatcctgttagaaaagatgagtttaccttgtcttctaaagggccgggtaaaaatggcattattcctttccttgttctccattagaatatcttatagttagagaaaactaacatagaataggctgtacagaattattggatattcagttgattaagcacatcatttgactccattcataacactattcaattagtttcagtagcaatcaaaaaataaagaactggccttaccttcggatatttgaaacattgctttagactgcactgacttgattatggtccagattgtctgtggatgttgtggaaactcaaattttctcagctgtaaaaaacaaaaaacaaggcaaagctaaacaaaacaaacaaaaaaacaacattgaactatccagtaagtattcagaaaactctagccggggagccctcctgtgggagagggtggaggtggttttctgtgctgtagctatagctggctgtgctgttcgagtgtcatttccttcaggcccagtaagctttaaaacaaagtggatgcctcccctagtgatactgagtgacttttttttaccaaaggaaatgtctttttctttgaactttctaattttgacgtaattttagactcatgagaaaaggtgcaagagaaagaatttttcatacattcttcaactagatacccacatgctgacactgaccacatttgtttcttcctgtctccatctgtgtacatatgtgcatatattttttttctgaatcctttgagagtaagttgccaacatgatggtcctttacttctgaagattgcagaatatgttttctcaataccggagtaatctgttatgtaaccacagtataatgatcgaagtcaggaaattagcattgatgccatactttacacaaaccttatttaaatttcaaaatttatcctcagtacatacctaatagtaagaagaaaatcccagctcacatgttgcatccagttgccacatctctttagacccctcttatctagactattatgtctagtctattatgactgtggaattttttatgagcgcaggacagttattttgtagactatccttcaatttgtgtttgtctaatgtttcctcctgtttagactcaagttatgcaattttttttttttttttgagacagagtctcactctgtcgtcacccaggctggagtgcagtggcatgatcttggcccaccacaacctccacctcctgggttcaagcaattctcctgtatcagcctcccgagtagctgggattacaggcgtgtgccaccacatctggctaatttttgtatttttagtaaagatggggtttcactatgttggccagactggtcatgaactcctgacctcaactgatcggcccgcctcagcctcccaaagttctgggattacaggcgtgcgccaccacgcccagctaatttttgtatttttagtagagatggggtttcaccatgttggctaggctggtcacgaactcccgacctcaactgatccacccacctcggcctcccaaagtgctgggattacaggcgtgatccaccgtacccaaccaagttatgcatttttggcaagagtgttggaggaggatgttgtacccttctcagtaggcacacagtgtcagcttgtcccattactggtgggatgaacttggattacttggtcaaagtggtggccgtcaggtttctccactgtgaagctaattttaggatatttatttaattagatgtaaaatatatcctaaataaaattataattgcatttcagaatttaatactctagcccaggcacagtggctcacgcctgtaatctcagcacttcaggaagccaaggtgcgtggatcatctgaggtcaggagttcaaaacgagcctggccaacatggtgaaaccctgtctctagtaaaaatacaaaaaaaaaaaaaattagctgcgcatgatgtcgggcacctgtagtcccagctacttgtgaggctgctgcaggaaaatcatttgaaccaaggaggtggaggttgcagtgagctgagattgcaccactacacaccagcctgggtgacagagcaagaccctgtctccaaaaaaaaaaaaaaaaaagaatttaatccttttcaattcattgtattttaaaggaaattcaacaaaaaacatgtgcacaggtaaagatgatactgataatggcttatcagtgtctgaaaataagacaaacatctctatgcaattccatgaaagaagcaaaatcctttggaattacatacacaaaatagatggtttttgtgtgccttacatgtattttcctctttcttacatgtcgaaacttttgaaaactttgaccacgagttatctacctgaagagggagatcaaatttaacaagctctttgaaaggaaaaaaaaaaaaatctgtatttcctttcaaacttctaccatcgaatacagatactcctcatttcttagaataggtttatttgatgatgtttggttgaaccttgtctgaagtataatcttatttttcaccgactaaatccttagagtggagtgaggtgagggctttacgggagaaaggaattaaaatacgggcgtctcaggtgtgacccaccctgtggtgtgcagacctgcagtggaccctgaagcacaggcgctctcagcagcggggcgtctctgcgcgtcctccttaccctggcttctgcagcacttgctcctgctcagatctgctggtgtatttcagcaggtttcttgacggcatgccgtatactatgtcctgatgttgttgaaattagaagcttttgtttctaggaaatatactatttctcattctagtcattccttaagaaaccaagaactaaaactacatgctacaaatggccttctgttacaaatattctctctgaattatggcttggtaaggctgccagataaactagaggataccggttacatttgcatttcaggttaacaaaaatatctgggtcaggcttaggctaaaaaaaaaggacttggtactttactgaaactcaaatttaactgggtgtcctgtatttttatttgctaaatctggcagtcctaggcttgtgccaaaattaagttctgtccttctctcaagagccactttgggtttattttctagagatgatggtgtcctctcaaaaaccactttgggtgtattttctagggattgtggtgccctctttgttctgattgctgggaaactcagaaccaagttggtggctcacatggatcagtatcatggggctttacggtatgcaccgagaggtccagccccacctcccagtttgcccttacttttattgccatcactttcccttttccagtcttcccttcattaaaaaaagcaagagcaacaccagcaaaccaacttgtttgttgcaaatatccttaaattgcttcatagccttttactgaatgaggcacagaatgagttagaataacacattgattattgatacccatagagtaaattttttttttttggcgaggggacagagtttcgctcttgttgcccaggctggaatgcagtggcgcctcttcggctcaccacaacctgcctcctcctgaggcaattctcctgcctcagcctcccaggtagctgggattataggcatgagccaccacgcctggctgatttttgcatttttagtagagacggggttttgccatgttagccaggctggtctcgaactcctgaccttgtgatccacccgactcggcctcccaaagtgctgggattacaggcatgagccaccgcgcccagccccccatagagtaaatttttaatcctaataattaacgctctattgacatggtcttattaatgcttatagaatatttctgtagcagtcccaagagctaaaattttactctgaattttgaatcagaaatcccaagttcagacagcaatatatgcttctaaaaacattactggttttaccagtctttaattctcaacagagactaaaatgaagagattttacatcttaagaggtgatgttactagaatccaatgctcagaatatattagatacagtgagttttatgtgttcaaaacacctttaaaaaaacaagaatgagaggaataaaagcctacacattgggttcggtgtatattgcttgggtgatgggtgcaccaaaatcccacatatcaccactaaagaacttactcgtgtaaccagatactacctgtttcccaaaaacttatagaaataaaagtttttttttaaaaaaaaagcaggaatgaaactcatctttaaatagccttcattttaccataagaatgatcaaacttatttcatcattcttaacctcaggatagcattaaagtatttggcagatgaattttatctgaaacaggctttgctttatttatagttggaaaagaaaaaaatcttgattttttgtttctgaaaagatctctgttacacagacatataatgatgcccttatttttaagttaattactagcatccttaatccctcttaaaattttgtaaactatactggaaatttaggaattgatctattgtattttcattgcgtcttctttatagcttttaaacacaagctgctaaacatcaataataaagaatcgctctcctttttggcctacactgctgtgagtagacagcagagatacctcttgcttgtcttccatctaaattacatgagaatgggatttatgcaggctataaatctagtcagaataaagcctttaagtggtaaccaattttgtggtgtgtaagtatcattgatttgttaatctgagagtgtttttataaactgatttggattagtgagttctgatagcagagctattttaaggcccctcaatagcggtaagtgtagtgaaaacaaggcagtgaaaattaacccattgaccccacctataaatttaaatcacagcctttgaaaggagagagcagtctcattatatgtagcttgctagtgtctagaccatactagccacagagaccatttcttcataattggttgttgttgctctggattcagaatcagtcccttggcactttgcagaatggccaactgttgtaattcttcaggaactttttgtataaagcactattaagatgaacttagatgtaaattggggagttatatttctctgttataaaacataatgaggaagatggcttccgttctttaatatctcatagctagtgaatactagaaccatactatttcaacagaaagaatgcaaggatattctacccatggacacatgaaagagaatttttttttcagtggaaatagcagtaggaagaacaaaaatcaaagacagattttagtcttgagttttaatattgattgattgattcgtttcacaaaatctcatttagaaacggagcttaaggtgttggcacagaataagcgcttgcatcatgaggactggggtaatttcatttctacaccagggtagctggagtaaacgtgagcaagaacgtggaactcagtggagaaaaccaaaactcaagtcccactgacctgaattttgctatggcaatatagtgacaaaaccaaaggtgcaggttgagcacagtagctcacacctgtaatcccagtgctgtgggaggctgaggtgggaggatcacttgaagccaggagttctagatcagcttaggcaacgtagcaaaatcctgtctctatataaaaaatttaaaacttagctaggcatggtggcagatacctgcagtcctagctactctggaggctgaagctggagggaggattgctcccaggagctgaggagtttgaggctgcagtgagctatgatctcaacagtgggtgacagagtgacaccctaactgttcttttttttaaaaaaagaagcgattgaggcacagaattgcatgtttggaaaaacaattaaagaaattcttccttacaaatttacccttatggagactgagaacatgatcttaaaaaataaatacatacataagaggttactggagccaaatatgtagaggtcagtgagatttcagctgtgtattgaacctgctgcctggctgggttgtcttctgctgtgtcaagtcctcagggctgtaatcgagccagctgtagaaaataaaaaggcaagaggcaggaggaccacctacttcatgtgtttcaggactgctagggaagagccaaacggctgtccaaacttctgcaacaaagcctgaaactcatcatccctttgtgtcttaaaatgttgatgtctacatacatccactccagggacaagaaattcttattcggtttgagctacaatttgaacgctatttaattgacaatcactatttaacttaattgttagatacacaaaatttgagatgtgaatatagcagactctatttggcgtttagaatagtcttgggttttaatttctctttggtatgacatatctatctgcaaaagagggcttctgttttctaagagctcatctactaatactgattatttgacattattctgacataactgtaatcatttctgaagcaagacccactcattagtcacaaaaagccataatacacagctaagccacgtttcacaaatacaagaaaaccaaagctcacatatatgaatctaatatatcaacaaaaccttcttgtacaatgtgtagcacatagattgtgttttctctgagctgtcagtaagcatttaatggtgcccgtgtgcttcagaaagagaatgttagtgcttaactcacactctgaggcttcctcccaagtgcctccctagaaaaggaacgctgactacagataaattagataaccgggcttttttcttttaatctaaatgttgggaagaaatggaaccagattctgaagtgttctgtttggtttttctccaaatacaaattgggcttcatacaaatggagaagccattgttgacattcattgacagatctgaagcaatgcattctttatgaaatagcactgcattgctaatacagccatcccggcagccaggcttgtgctgtttaatttgtttccatggtgtgatagtataattttgacatgctgaaaaatcgctgcacagagactcatcccgcaattgttactgagcacattttcaatataacatttgttattgaggtgttcgggatgtcttctgagaagcaatatcctaaatgaagctggatgtaggatccccctgttgtataatggagttttgtatccagcttcagcttatctcaaatctatttaaacagatattcattgcacactttttattggagggacaacagctactctcttacaataaaaccaggaaatcctcaacatcatttctttttacctttggatggcaagtgtaagggggatatgttaaaagattttcttctaataacaggccagccataaggttttttcccccaatttggcacatgaagattataatagaagaactattattatattaaattaactaatcttacaaaatagatttttgtgctttttatattatgtttaatttcagattttgcagcaccattatattcagagcaattatgtgggtgactgctctatgagtcaccagctgaaatagaaaggttgggctctggtgtcctatttgattgggaagctggaaggacaggctgtattgagcacagacatttttcataattatgttgcctgcagggttgccacctgtcctaatttgatctgattaaggtgaaatgcaaaaacggttctcatttctttcagagtggagtgatgccaagcttcatctcaggaaggaagaagagatgaatacacatacaaccaaggaggggagggttgtgtctctaatactctgggaaactgggggacattggcctcactgtgattggtggtgttaagtttgtagacaaattctgaagagtgttttggcaggaatgatggaaatgttaaatggaacgatactttaacccggtggtagtcgcactttggggagtgtgtccaatttaatgcctctgaatggtttgcaaatatgcatgtctaggtgactcactgacaccaatatgatcattagggtttgcctcaaggatattgcaaaggtgcgtagccattaaaaacgatgatgtatgtctgtatcatttgacatgaaatgatgcccattcctattattaggtggaaaaaacaagttacagaatgtcatgcatagtatgatgcaacatccttaatatcctatgtgtattgatgtaagggcatgcaatgagttatctaggagatgattcataaaaaaatactggtgactgtctctgggtggtaaaattgctaatttctacctttctcaactattttaatattttataatggcaatgaaaacaaagctattttaattttgaaaaacacctttaaaaagggaattgtaaatattaagcatttcctgaacttctcctaaataggaaaaaaaaaacctggaaatgataatctgacaccaacgcttctaagaagagaagagaaaaatacatatgccttgatgctataccctgatagtgccattatgtaactgaattttctttatttcttatcccaagatgtgttttttagcttaaacattgtctttttagaacagcttaacaccatttgtcctaactgctacctagtcgatatattatttttcattgttcctgaaagttttaaagagaatctaaaggaactatatataacctatgccctgtgtgctcagagtgacatcatatcaccagaaagaaaaaaagtaaggcatgaaagtcaaacagaaaaacattttaggctttttggtaatgctctatagttcatcatcaaaaaattaaccagtaaatcatggatctattttggtttatggttttcaagatcttacaaaatgtgtatgtgtgtgtgtgtgtgtgtgtgtgtgtgtgtgtgtgtgtgtgtgtgtgtgttggaataggccatctcactggaaagatgctggttggaatttagtcactggcacaagggctcccatagtctttttcctatgtcaggcctatgctgggatcagctacatggatgcagcattgagcttcccaacctgggtgaacatggatctgagtcataagacgacagctctgaactcaattcatgcatgtatgacacttacgtctggtttcatttatccttattataaaattaataatagtctgcaggccaggcgcagtgtctcacacctgtaatcccagaactttgggaggccgaggcgggcagatcacgaggtcagcagatcgagaccatcctggctaacatggtgaaaccccatctctactaaaactacaaaacaattagccaggcgaggtggcaggcgcctgtagtcccagctgcttgggaggctgaggcaggagaatggcgtgaacctgggaggcggagcttgcagtgagcctagatcgcgccactgcactccagcctaggcgacagagcgagactctgtctcaaaaataataataataataataataataatagtctgcagatgcagtctttcctagttcagattatatctgctgcgcccaacattgtaatgtatagatcttcaaagaagaactttcaactttagagactctaaattgtttcaaggtaatctcaatgttttaacaagagttggtgttctcatataggaatgtttctgctattataaaataagacgaattatccaaagaattgggttgtcattggaaattctaccttttaaaatatctcctttaaaactgttactttctgtgagccagagagccatttagaaaatgcactttacactttggtaaaaaccagtagatgaaagcaatgattccaaattcaccattcagtcatgcgtggagctctgggcacggtgagctggggagtaacaagttaagtcaaaaactccttctctgatctggaggtgttataatgtaaaatagacaagagagtggatatgttcaaagaagtatgagcgaaggacgccctaagcactgtgaagagtggactgtttcattaatgtgtgtcctcagctctctgcgcagtaaatattgagtgggtgataaaacctgaagcaggaaaggagcccttgtcagaactcactagcttagcatggcttccacaccctctgcactagcagctcggcaggaccactttcccatccctcacctttaagtcctcaaacagaatctcagccttctgagtcaacaccaattgctgatgttcattctcaggccagcgattccatttttccttcatttcttccattctatttcctgtctcttgctcactgttgatgacataggcccaacgcccttcaccttgtccataagtaagtctttgcttctgattgtccagtgactcaaacctcagacttcagcatatcctcttccgtgaccttcttccgttcagcacattatctgtgtttttagattccaggcctcttctctctcaacacttctcaaaaaaactccttttgcttatgtacttattgggcatggtagttaattgacatttttaaagtcactaaataaccaaacacaaaaacagcaaatacaatggagacaaacactttgtgaacttagaccaaaaggacagcacagaagtagtgaaatgacctttgacaggttctttcactgcagtagctttactcatgcctatgaaagttcttaaaataaaaattgatacatagagaaactttttttttttttttgagacagagtctcactctgttgcccaggctggtgcagtggcacaatctcggctcactgcaacctctgcctcccaggttcaaacctccccagtagctgggattacaagggcatgccaccacgcctggctattttgtgtgtgtgtgtgtgtgtgtgtgtgtgtgtgtgtttagtagagacaggatttcactgtgttggccaggctggtctcaaactcctgacctaaggtgatccatctgccttggcctcccaaagtgctgggattacaggtgtgagccaccatgtctggatgatagaggaagttgtaaatacacaaacacagatagatgaaagtttttcctaggataatcttcagctttgacacaccaacgatatccgtgtctattgagcttcattttctagttgataagtgcttgcttaaaacaaatttttgggctgggtgcggtggctcacacctgtaatcgcagcactttggggggccgaggcgggtggatcatgagatcaagaaatttagaccatcctgtcctaacacggtgaaatcccatctttactaaaaatacaaaaaaattagcctggcatggtggagggcgcctgtagtcctagctactggggaggctgagacaggagaatcgcttgaacctgggaggcagaggttgcagtgagccgagattgcaccactgcactccagcctggtgacagagcgagactccgtgtcaaaaaacaaacaaacaacaacaaaaaaattgtctataaatgaatttcttatgtaagtgtgcaggatgaagggctggatttaactgtctggaattgcttataccagggccatggtgcagtcacctgagccgcataccaaggctcaaggtctcgtgttttagaggcacctggttgaacacttgtgatgctgcactgcaaaacatggatagcaaatttgagctcattggtaaaactctctgacagatgagacgtgctcagattcatcattttggctaattaaaataaagaataattactaattctcgtgataaaatgcaaagatctgggcaatcaaaccatagtgtaattaacaatatactcaaagctgtgtgggttttcccgcatcatagaagctattagttgtcttttaaattggatttttgttttattttcataatctctttcaaatgtatctcaccccagcatatacactctaaatatataaaagcagggatgctatataaaagcagtgatgaatttaagtggcaatatttagagtgcttacatgggttttgttttttataagaatttgaaagatgcctttcagtaatgaatgcagttatgcctacgctaagatgaataaaagaaaccaaatgcacagaactaaagtgacaagggaaagtactgaaatgaatttaaaatacaaaattcaaaaacaaaaaataccattaagtacttgtaaaactataaactcttttctgttcccctgccccattccactttacccccagcccctctctttacctcatttttaaggaattgtgtccatttaagaaattcctccatttaaggaattgcatcaattcctaaagtccgatgacttatatttatttaatactggttttggatatgatttattttcccaaacttaatagtgcctgaatatgccctattcaggaacatgccctacaaggaaggccagtttacagagcacactctatggcgaagtatagggtacaaatataaattacacaagtttccagtttataaacaggggagtgttccataaatgttcatgtctatacattgtttggaactcagaattcttttctcctaaagaaacctcattaaccatgataattaggtgccccgctgaccctctagaccctatttaactaggccttatctgacagggatgtgcctaacctaagtgccctttttggttacacccacttgggggatgacagtcccacagattctctttcccccaacgttaactagacattgacattttcactcaggtaaccaaccaaccaccataatctgtggaaaaacatattaaagagagcacaaaattccatctccttcacttcctccctttcctttctctgatgtcaaccaaggacaaacttttgagagcagcaggagaaagaaaataatggataaggatcccttttcactctgagagcctcccattcccagtggccactcatgtgttgaccagccaaattaaatttgtgatctgagggatgctggatgttgaaaacacttgccctgtaaaatgtatcatcacaatcactcaaaatataggtcaataacaaaggaagaactttatgaaattcaaaggtgaaggcaaagcgccaagaatatacacacaattcaaaatatttaagttgttttgacattgtaatgacatacaaataagaaaaatgagaagtgtttttcatcttttgttactgcatgttctaccttgtcctctgtctcaaacctcccaaatgaccacagaaaatctattgcagagcagcgctgattagatctagtgcaggaagtgacaccatcgtgtggacagtcatggaggtgtcacaggaaagagaggtcaggggagggtgttcatagagcctggggatctgggcttaagcgcttattgcagatctttcaagtgggaaactgattggagttgagcagatcaatgacatagtagtttggggtcagtggacacagtgagacaaagtcctaaggaagccttcataaggaaactgttgtcttatacaagagctattattgcccaggtgaaccgtctgatttcctgttaagagagatggctactcagatgagcaaactgtctggttaaattatttgcaggagtttcttgaagcaaacagtgaagttatttattgctttacaagcttatcttccagggcagaattcttctggaacaaataattaggtctcagtggtctcagttctcagccccagtaggtaggctgtgtgtatgcaggtgctttcaattctcatctgcagccaagcagctgcttggattcctcaaacactccaggctttggcctctttgattccaagccacctcctctttttctttttttatacctctttggttgctctctgctcacttggctctttctacatctacttggtttgttggtgtgcgtcttatttcttctgcaagctccaggaaggcagaatccctgtctgattcatttatgatttctctatggcccctggcgttacgcatagtaagtgtacactcaagagttgttcgatgaagaatcaatgaatatttacttggaattcacctccggccaataaggataatattatttgtgaaatgaaaatttctgatcgtgtctcattatcaatgagactgattcttccctggcacctcattggaagatggatagtctcatagccactagaagctgacccagcaaggatgtttggattaatacagcagctgcaaaaaaccagaaaataccaatctgcatcaattttaatataaattatgaaatcacagctatctgagcttcatacacactatgctgagctcctaaaagatacttcgcatcttctggactggtaactgcctcatctacaagtaagaaattgaatagataatatttcatggcttctttcagcttattctgaaagcatcaaaatttacaaagtttcatgctatactactcagataagttatgtctactaattagtggttgtattggaaggttttccttctccagactacattcatgctcatatatgttcacaaactcaggtctatacgttattgaatttttattcagccttttccaaggttatttttagatgtactttaaaggtttcatctagagatttttattatgaaaagttccagacatccagttagatatttaaagtagcataatcaatgtccatgtacacactacccggctttgatgacttcattagtttagttctttttctgcctcgatttcgccatctttaaaatggggataaaaatagtacctgccttatagggttgtcatgagtagtaaatgaattacatgcataacactgtgaagagtgttttgttcctactaagcatcatagaagtattagcttttctttttaacaattattgtaatacactttaagacagatttgaatagcagtgcccttctatggtcctgttcctctttcctcttcccttcaatttgatacatacttcaggggcgtttatcatttgcaggcattattttatattcttagtatatttgcgtgcatcgacattgtttaatagattctctaaactttctgtaaatgacattgcattgtgcataaacgattgcaacttttttctcaactttatgattttgagatttacctgttttgatacatttcactctagctaactcatattaactcaattcctaaaaatctgtgcttcagtgtcatggtctcaataagaaatgaacacttacttttacgttagccaaccctgccctttatactgttgtattttctcttttccacacagtgctaatgaccatccaaaatgttacttcatttacctacttattagtttatttttattgtctctcgcccctttagaatgcaagctccaatgagggatttttgtctgttttaatttttcacggctgcgacccaagtgtcgtaatagtgcctggcacaaagtgggtgcacaatggctatttgttgaatgattttatctcttcttctgttgatggtcattttagatgtgtcgttttgttgttgctgttattacaaaaatgtcgcagtaaatattctattccatatctccttgtgtaaccatgtaagttactctcccgtgtgtatacctgtaagtacattattaggtggaaggtgagtatcttcaagattctccttaactggcttaggatatcttgagacagcaagtattggctacggagaaagaatgcatgaataatcctttataaataaaaacccatcagcagagagaaaggattaaaataagcttggctttatttatgaaaacgataatgctttaaacttgattctgtaaagtcctgctgctgactgaatgcaattactctgtcgagacagcttagtgagttttccagggatcctattaacgcctggctctcagactaattcagaaatggctacttcagcacagtgtatggcaaccctaatcaacctggcttagctggagtagcaagccgcccactggattccttcactgctgcagcccagcctgcacatgtggcccatgctctctggcttgtgctcagaggtcagtgttcagtctcgctgcattgtcttcgatcacattgaatcttcatttatttttgatgccattttgtcgttagtcggtttccttttctaagttgtacttaggggggaaatagaaggtcactgtaattgtcaagcccacattagggattctaagctatagccgagagagaaattaatcctcaaagcgtttcgcaccaaacagcagcaatctgcaaattgcagattatttgtgtcatgtgaccagtgccaggagcacatcagagagctgaaatccatttccatttctatcccaagcctgggtgctcacgattttccattgaacccaaaggatatcacaattgctcctgtgatgacttgcaaagaaattaaaaggaaaaatagtgatcgaagactcatgtggtttttaatgcttctcaatggaatatattttccaaatgagttttccctactttacagcatgattgttgaggaaattcaccgaaagctttctgaaaacattatggctcagttaatctctcaaaggtatttgttttgttttgttttgtttggggttgctttttctcagtagctgtcagtgactttgtggaaatgctacacaactttgtgacgcgttttcattgaggagcttccccgttagatgataaaatgacctttatggtatagcaacagaataaaagtaaatgttgattacagatactaattgaaatatagagcccagtttcgcagttgtcctttaaaataagattcaatcctgtgtttatatgctttttaacaaattgtcttattcatttttaacaccaaaaagctggtattcattgaacaccaatgagctcagatttttagaaaacacaggcaacagttgagtgatgggtttaataactagaggaaaaacacgacagaagagcacaaacttgtgagcacggcatgaggatggcacggaaagaggtgacattctcttttaaatttccaaggacagcaggacgggctttaaaagtggagtccaggacaagaaaagagggaaaagatagagaagaataggctcttgtcaagaaagctaacacagtgtcagtaggtaaaaacactactcgattcctgtgtgttctgttttcttgagcaaagagaatatgtcccatgttagaaaggacagaataacaatttaaggagaaccttgtgcttaagaaaaatgatgacataatatggcatatacaaatattttaaatgccaatagatgtccaaacacttctattatagtctcagagatgctgccgggaatctttgagatacaataaagagttcagagttccggagatgattttttaacttttcagaatgaggaaaagttgaatctcaaaagttgaaaagcagtgagtttgataccagtttcacccatcaaacacccaaagaaaaaaatcatgtgagcgcttactcacgaatttcatcaggaatactcattacgtaaagtaatatgcagtcattaagagtcaacgcagatttaccaaaaatcaatgcagaagaacccatatgtgagggaggtgatgcttaaagggcatggaaggatcggacatggtctctattgctccaaatccagaagtagtactgtggtttttattcgccaggcccatgttttcctctctgccacctccgccccctccgctaacgttttcctgtctccctacgcgaatgcattctgtgggcccgtcttgcagttccagttttgttatttttaagccccatcttcacactgagtttatatctggccatttcccacactagtgtccctgtgatgagcacagtttgcagatagccgtccacggtcttcttaaatatcttgccgccttccagctcttctcatctaagtctatgctgtgtctagtcttgtttgttgtttttttgaacctaccaggtgtttcaagtaattatctagtcttctgttaaagatgtttatatacgagctatcatcaacatcagtcctttcacttgtatcttaggagacagccagaatacacattctgaagataagctaatttaaaattgtgtttcttattttatgcaggattaaaataaagccatttttctcaagtttgagtgacataaaagaccgcttgtaaagaaacaaaaaattctccaaaacacccaaggttgaatgaagttttatatatatatatatatatatatatatatatatatatatatttttttttttttttttttttttttttttttttttttgagacggagtctcgctctgtcgcccaggctggaacgcagtggcgccatctcggctcactgcaagctccgcctgccgggttcacaccattctcctgcctcagcctcccgagtagctgggactacaggcgcccgccaccacgccaggctaattttttgtatttttagtagagacggggtttcactgtattagccacgatggtctcaatctcctgacctcgtgatctgcctgcctctgcctcccaaagtgctgggattacaggcgtgaaccaccgcacctggccgaatgaaattatttttaagacaatatgtcttcaatgtgtctagatataaactgagctataaatactttatgcttatacaactagaaggcccaaataaaaacatatcaattaaatataactgaaagtacaagaccaaaatattctgatggactctatcaatttaatacgccagaggctgtcattttactgacactaaagcagtgcttgggatccgaacagggccctgatgagttggcccagattcaaatgttccatctcagcaggcctgggaccctgagctgtaggctgcctcccttcccccacaacttctcctgtgactctacccttcggacactcggccccagaccatgggacgtcactggcaggggaagcctcccttgccttctatccactcttttctcactcatttcaggaaactaaactatgatgacttgctcccaaagagatccaaagcacaggaactgacttgaggctgaatttcacagcagtttttgtttgaactgaagccagtcaaatgatccagaatatatttttactattgtttaggtaatcatcagaatagcaaccccaaaatcaacaacttctcaaaaagaatcttcagcctgcaagtctccgtggtctctagttggagaagcactcagctcaagcatctgtttctcacttgaaggatctggttttccttctctacagtaccagacatgcctgtgaaagctaatgtattatgttttccagtaaaatattcacttgggttatttatttatttatttatttatttattgagacagagtcttgctgttgttgcccaggctggagtgcattggcacaatttcagcccaccacaacctctgcctcccaggttcaagcgattctcctgcctcagcctcacaagtagctgggattacagatgcccgccaccatgtctgactaatttttgtatttttagtagaaacagcgtttcatcatgttggccaggctggtctcaaactcctgaccttgtgatcctcctgcctcagcctcccaaagtcctgggattacaggtgtgagccaccatgcccggccaggatttttatttattttcttggtggcatcacctgtttacacgtgtgtttaaattttgttcacatttttgtaatcttttgtactactcagtaaacatttgtgaagcactttctcaacatatgaaatgttatataatataggctaaagctatgttccagcattttacatgaccatagaattttggaattggaaataactcagtgtattagtcaggcttctcccaagaaacaggacctttctgtctataggatctataaagagaaagagacaagaggacgtttactgggggaagggctcacacaattatggcggccaagcagtcctgcaatctgccatctgcaagctggaaaaccaggaaagcctttggtctaattcagtctgtgtctgaaggcctgacaactaggggcagcaggtttgggagtcgtgtatgtcttgcagtcagaaggcctgagaaccaggaaatctgatctttaaggctctagaagagaaagagcattcaccgttctctgccttcttgttctgtgcaggccctcagtgccctcagtggatgggacgatgcctgcccacattgctgagagtggatcttcttggtccacagactcagatgccagtctctcccagaaacactctcacacacccacccagaaataacatgttatcagctatctgggcaccccttagcccaatcaagtagacacataaattcatcatcatacccagtaaaattcctctctaaaatatcctacataagtattcatttagcatgtgttgaaaaacctgcagttactgtcttataaggcagtttattccattttcttctgttggtttaaatcctactctctgaaacaatgcacagatctaatctgtatcgcaatgagcaccttcacctgtgtgaatacaggttttctcattcctcagcctgccctcccccagacaaacactctcagggcttctgaccactctcacatcacaatgctgaggaatatgagaaatggctccataatttagttgatatgtcctgcatacaatccagtttccttactaggaagttcaacagattatataatccataggtcttatctcaaagaaacaggtttttatatcaattttgtttccagagagaataatataaataagccagttacagtggctcacgcctataatcccagcactttgtgaggctgaagcgggagcgtcacttgagcccaggagcttgagaccagcctggacagcatagtgagaccccatctctacaaaaaattaggaaaaaataaaaaacttagccaggcttggtggtgcacacacctgtagtcccagctactcaggaagctgaagcaagagggtaccttcagccaggaggtcaaggctgcaatgagccatgattacacactgcaccccagcctggagttagaccctgactcaaaaaaataatagtataaatgactacaacctaatatcgaggaatagttctattgaaaagacagggatgcaacacattttaaatgatattaagcatatactggcctaaattttacatatctatacatttgggcctcgaacaatgtgaggcttaggaacaccaacatccctgaagtcaaaaaactatgtggaacttttgactcacccaaaacttaactactaataacctactgttgactagaggcccttcctataacatcaatagtctatgaacacatattttataggtcatatgtattatatactatattcttaaagtaagatagagaaaggaaaatgttattaagaaaatcatcaggaagagaaaatgtattaactatccattaagtgaaagcagatcatcataaaggttttcatcttcattctcttcacagctagtggctgaggaggaggaggagggggaagggttggtcctgctgtctcaggggtagcagaggcagaagaaaaaatctgtgtataagtggacccacaaagttcaagcccatgttgttccagggtcaactgtattttattttacatagaatatttattatatatgttatattattatatataaatatatatatttaggccaatatttatattaattatataattctataaaattatatatttacatatataatttatatatgtgagttatataaaaatatatataactcatatctatacattaaatataattatataatattttatacatacgtattttaattgtgtgtgtatgtgtgcatatatatatatatatatatatttttttttttttttttttttttacctatttacttactttgttttacaactgaagaaggaaaaggtgaaagtctgaaggagcttggattgattgggtggaacgagaaagtgataggcaccagaactgctgggccttctctcttggtccttccgtaagatgccctttccaaactcaaacgcaagatctaataggtcttcacaaagcctcttgacaaaaccaggcaaggtactaaccgccagctgagccccccaaagaatggatgtgtagctacccgacctttgctcttacctctcaatgagcaggcccctggccttgatggtgagcaaacaggacatgatgaataagtcagagcctgtggtcaccaactcccctactctggccctgcggaatcctggctatatatgaggaaccagtgacatgctgaacatgtttctaagaaccagagtggcatgacatcctaaggccagatcataatcagaggggagagaaagcctggccagggtcacatgcaactgttttctaaagaggtgcggttggaggccaggcagcggccatagctcttttgagggtttggctttttttgtggttggttagatgtgtgtttttcaggtacacgtctgtgtcctcccaaaaggcaacactggcagttgatagtcataactctgtgtaagaacatataaccacacagagtgaaagtgacgtttttgtgattaattcttctttccaacagctggctgtcccaactccttgattaaagagctccatcacttcaggattctgggagaagagcaggtgagtgagcatctcaaaggctgcatcagactgtcatgaaagatagacgctaatgagacagtttgggctccccagggaggccgagtatgtctcctgaccctgggtgccctgaaatggggaagaaaaccatgctggagatatgtgtgaggacacttttttcctcttctatccatcagacctgacaggttattaattgctacatctgctatctgccagtgcagtgcatttcatctcaagactcaagcaggaagcaagcactgcatagtggcagatgagcaaacaaataaatgcagagatgaattatgcctgagggatcgatggtcatagacattcctaagttgctgtctgtgggtgaatgtgtgagcattttttttttttttttaccaggtttttgtattgggtgtttgttatctgtatttcatggcagccttttgtacacgggtatgaacatgtgacgtctatacaaagggtgaccatttgaagtggattatttaaatgctgtgttgtgctcagtgaggcgtgtcataatttaaatagatatgctaagtaaataattcagggtgctaaatattatatatatgtacacacatatatagtatggaatgcttaaaaatacgtttcttgatccctatatggaactacaaactctgtattagtatgttaaatctaggtgtcaagttatccttaaaatacactaaagagttggcaaaaggctgattgacctaacttccagtgttatttattttattttatttattttttgagaaggagtcttgctctgtcgcccaggctggagtgcagtggcatgatctcagctcactgcaagctccgcctcccaggttcacgccattctcctgtctcagcctcctgagcagctgggactacaggcgcccgccaccacacccagctaattttttatatttttggtagagacggagtttcaccgtgttagccaggatggtttcgatttcctgacgtcatgatccgcctgcctctgcctcccaaagtgctgggattacaggcgtgagccatcacgcccagcccagtgttatttatttttactcctaaagattgtctctgccaactttgaccaggaaatatgcaaatggagatgtggcagctcactttcatcaatgagtttttggtttgtgtgtttttgtttggtgtatgtatgtggcaaagtaaaactgcccatttccaatatgagaataaaaacaaaaggattagtaaggagaggataagaaactggaatcactgccacatcctggagttagagaattacagtacatccccttcatttttctatattgtgagtttccagaatagcaggcataaatgtatattcaaatacaagtgaaatcagttatcccgtattgcaggtaaaagttgacaactgactctcccaaacataactccttgtgaagacacctggatctcacagccatttcccagtgaaagcctaaagacttcttaaagcaagaatcactggttgttaccctgacaattctgctcagataatggagtcttctcttcaaacttgtaccaatatttgcagtgtttccatttttgttttagagtccatgggtaattagtaaggaaagaagccaacagtaatcatctcctcagatctgctttgtaaaggtcaggtcactttgcattctcctagaaatttaattgagccataatcaaaattaatatcactacgattagttttggtaatatagtgcatcagagcaatattgatctctatttcctaaaacgcaaacacacgcgcaaacacacacacacacatgcagacatacacacacttccttctttctttcagctgatacttactgagtacctactatgtgctatataccatcctaggttacagggatagaggagtgaaaaatctccatattctacttagagaaaaccatattatatacacataaacacatttagtgtatattatgttagatggctatcattgctatggagaaaaaggaaatgaaaaaggacagcactcaggtgtggtggctcacacctgtaatgataacactttgggaggccaaggcaggcagatcatttgaggccagaagttcgagaccagcctggccaacatagtgaaatagtgaaaccacatctctactaaaaatacaaaatattagccaggcatggtggtgcacgcctgtaatcccagctgctctggaggctgaggcatgggaagcatttgaacccaggaggtggaggttgcagtgagccaagattgtgccactgcagtctagtctttgttacagagtgaccctctctcacacacacacacacacacacaaaaaaaaaaaaaaaacaaggacagtgaatactggaggaagaggtgaaattttatataaggtggtcagggaaagtttcactgagcaggtgacaggtgaataaagactgaaaggtatccagagaagcctcatggtgacatctgggaaaggagatttccacagagtggatgaagcaacaacagaggctccaatgtgatcatgtgcctggctttaacattcataatagtccagaaacaagtgtgactggtggaggggaggggaggaggacagagcaaaacaaagaggaaggagccacattgcatgagatagggttgcaataataaagtgggaggaggccaggcgtggcagctcacacctgtaatcccacatctttgggaggctaaggcgaatggatcacctgaggtcaggagtctgagaccagcctgaccaacatggcgaaaccctgtctctactaaaaatacagaagttagctgggtgtggtggcgggcgcctgtaatctcagctactcaggaggctgaggcaggagaattgcttgagcctgggaggcggaggttgcagtgagccaatatcgtgccaatgcactccagcctgggtgacagagtgagactctgtctcagaaaaataataatgataataaggtgggaaaaaatccaggcaggtatcatgacctgggagccaaaggaagaaggcatctttaggaggaggaatcatgatctgtgtcctatgctcagcaagaaggacaaggatgagaaatgagcactggactccacaatgtggaggtccttggtaaccttgaccatgggcagtgaggggaaagcctgcctcgaatggattcatgtgagaggtgaaccaaagagtgggagactgcaaatacatacattttaattttggcaactgggaacttagctgaagaggaaagcaaagaaatgaggtagctgagggatggagataagaaaatgaccttcttaatgggaaaaattgcagcatgtctatgtactgatggtaatgattcagtagaggagttgggagactgatgatgcagaagggggaagggagaattcaggagcagtgtccttggatgtaggcatgggcttggacaagagagtggccagttccgcctggtaacagtgggggagacagaatatgcaggcacagacgtatgagcattggatttgatggtaaaccttgcgtagggtctctgctggttgtttctcttttcttggtgtaacaggaagctaggtcatcagctgagagtacagatcggggaagagttttagagggaaaggagatgtattagtctggtctcacattgctataagtaaatgcctgagactgggtaacttataaaggaaagaggtttaattgactcacagttccacatgactggggaggcctcaggaaacttacaatcatgacggaaggcgaaggggaagcaaggtaccttcttcaaaaggcagcaggagagaaaagtgcaagcaggggaaatgccagccaattatacaaccatcagatctcgtgaggactcattcaccatcacgagaacaccatggggggaatcatccccatgatccaatcacttccacccttggtcccgcccttgacgtgtgggcattatggggattacaattcaagatgagaatttgggtggggacacagccaaaccatgtcaggagaggataatgaaattgtcatttaggagggtgaggagggaataaacttgggaaatggttgaatttggagtgaggtcaatccactgggtgtttttctgacacactcatctgtgtaggcacagatgcagaaaaggcactggcattgaagttttgcggtcaaaatgtaacaaaaacaagagggaggctaagaagctgagggtggatctcatcttacagtgttacaacaacagtgtaagctgagggtgaatctaagggagtgattatgaccgaccatgaaatttcagctgggcaagcagagaacccagatgagagagaggacagggaaagttggttacagatgccagtggctcaaagaattttcgggatttgagtactagaagggttgaactggacaaacaggcattggccaaagaatgaaagacttcacatcgagcttgtggaggagctgcatggtcagcaccgacgaggtcagaggaggcctagggaggctgtgtgtctgatttcagatggaggacaaggtgacgagagaagttgaggtcatggaattgggaagtcggagagttgggagtaccacccctgtgcacgctgagatcttccagaattgcaaactgaagatttgagaaatgagagagagagagagaaatggatgtcagtagctgacagcagaaggggaaatagtgcatggtgtaggctgatgggttgaaatggaaagttggagggctttagaaggagaaagggaaaatgttttacttacaacactgtagagcaatgctttgtggtactgggattgcagacacaaaaacatttgagggtgctgcaggcgaagtagtgtcctcagggacacgcctgtttcagttagggaagaatgtaagaaaaacattgagaaagcagattgcagtcatagggcagttactgctgattgcccatgagttccccaagcatgggggaagggtctcagggtttggggcagctggaatatgtggtaggaaaaaggatacacagagtggatgtggagcttggggctcagcctggagagatggaacaggagtcaggcattctttggtgactgtcgtgaacagggcatatcagtcagggacgtttatatcctgattattcatgacaagacctactggcctctaggcagatggtggcaatgaggctcccgagaggaagcagagagctcttgtcccagcattcctgccagcggtgggggcaactgctccaggagctggtgaaactcttgggatctcactggatgcttgaggcaactgttatcacttgataaaataaaatgtttatattaatgtctgttacaagcatccttggacaaatcatttttgtttctctaacttagctttttgtagacaagggagagtgaagctcaatcatctcttagaatatttgtaaataaataggttgccaagtaagttgcaaatattgtgctatactaaaattcctctgattttaaatgctgtttatattccagctttacatagtggcaacaaaatagacagtaaagtaagcgtaatactcacttagaaagtgagttgataaaacctacaaaaatgctggttaattactaattcattactgtatggcagagacccacagcagacctctaatttctttgtatgtggttcctttctgttttcgttgatctttagtaggtatcttgattttttagatttggattaaaaattaaacactatgtatcactgccttcccaaaataaaaataaactccttaaaataatacatttatattagcttcttagccccttctctgatttgtgttcacaattcatattcatatagcacctttcaacactccttccccctagtccaaattctttggcaaagacattatcacattgtaggaaactaaagtcactctgcagttccaggtgagcccttcagaaatcaggtatgatgtctggagtcaataggtttgtagggcctttgaaccaattgcatttcagaagtacctccatttataccagcttcctccaccttaggtttaatcactgaaattttatggaaataacctttatccattcaacaaaaatgtattgaatactttcttgtactattattgtgctagtgttggataaaatagtaaatgaggaagtcacagttactgatcataattgatgctaggatgaaaacaaatagggatgtcacctactttagatgaggggtagttgaggagccctgagactaagcgttgaggggacaccagctattgaaggagctagcattatgggagtgggcagaagagcatcccaagcagaggaaagcacacatccagtgcccccaaggaggtgaagagcttgctttattcaagacactaaattaaaccaaggtggctggaaaatactgagcaggaaggacagtgccaaaagatgaaggccacctggaccaaggacaccagggttaagcatatgggttttgttctgagtttagtgggaaatccttgaaggtttaagcaaggggttagcattatccaaattacattttgagtatgtcaatcttgttgcaatatggagaggctctggattaagacagttggcagcggagacaaaaagaagtgaatcttgagaggcagaattcaaggacttggtgactgactggctgtgggtcagggaaaggaaggagtttgaaagttctatttgactgagatgagcaaaatggggcaggtgagatcagaggcatgggatctgagcttcaattctgaacacatttgctatgcctgaagcatggagaaggagataagtcgggacttggatgtgtgagtgagagcttggaggacagtgagacctgaggtccgagatggagagataactttggaattaccagcatgtagaggaaattttaaacccatggggattctcagaagaagccaagaaaggagagaccgtgattggatgaaccgtaaggaacaccagtgtttggaaattgggtaaagagcagcaaccaacaaaggagaccaagaaggaacctcaaggaaagtagaagacaatccagggccatatggtgttgaggaagctgagaaggcaagtaggcgggccttccggaggaggaatggcaatttgtggtgttgaggaagccaagaaggcgggtcctccagaggagaatggcgatttatggtgttgaggaagccgagaaggcaggccttccagaggagaaatgctgatttatggtgttggggaagccaagaaggcggggcttccagaggaggaatgctgatttatggtgtttgggaagctgagaaggtggggcttccagaggaggaatgctgatttatggtgttggggaagctgagaaggcgggccttccagaggaggaatggtgatttgtgttgaatgctactgagagtttgcagaagatgaggtcagggagcgtccttcgcctgtgacactgtggcaaaagtcacgaatgaccataatgagcagttttgggggatgcgtaaagacaggagccagagttttatgggatgaagagtgaacagaaggggaggataattccttctagagggtttgctatgaagagaaagagaaatgcagcaaccacaagacagttctttaaagatcgaagggccagaacttgttttacactcacaggaaggattccacagagatgaattaccggtaatttgagagagagatccaagaactgaagaagggaagtactttggaaggcaagaagggctcagatccagcagagagggaggaatcggcccctaacaggaggaaggccactttttgtgttgtgagaggggctggagagggtgagtgcaggtgcaggtgtgttcatagttgcagggatgtgaagaggagagatgcagtatgatggctccacgaaggaagatgtcatttttcactgctgcgtcttccacatagaagagtacttgacacttagagtgtgcttaggaaacatctgttgagcacatcaggacatcagccatgattcctctctcctcagtgaaatataaagtatggatggctggagagaggcaggtcctacctacattggtcttaggaaccaaaaaattggtgcaactccagataaaagtaataaattcattttcttctataactacttcactgttatcctaattctactaattatcataactattaccaacatttataaaaatatttcttacccttgctatgtgaaaacttctatctcctatgcttttgtaactatcctcatttcatcttttttatttcaccccttttttcggcgggttgaggggaagaaagaagagagaacatgtcactggagaaacacaatacaatcttgaggaagttgtaaatgcccatttgaagtttgtggtccattatttaagagaaagtcatcgtgccattgtgtccagctgcagggctacacgcccagggaaggtggaggtgatgttttccaggcgtggaattttgccatcagataaagaagaccacggaaatctgtgttttccaggcaatgcttctggtggtagatgacagaagctgtcagaccaggaaggaaggtgggcctggagaggcccatggctggagaggaaatatggggccaattaattagacgtcttgatgaagttgaagaatttaagcaatgttcatactttagcaagagatttggaaagataagaggtgatcatcagaaagagacatatttggaattgggatttcagaggtggtacagtttctcaggatgacagagcctggggatggaccgtgcgaatagaaggatgagaaaaaggtcagcaggatgagaaggtaaaacagaaagaatagattgatggtggcttattcatacaggagttcaagtccccagaatgatgacaagaatcggagaaaaggtgagaacagcctgaagctacagtcttcaagaatgaggggctgcatccaggagatcagggggcagcagtgaggaggtgagggtgaagcatgggtctcaaaggagtggtgggttttgcaagggagaggaacccaagcatttgggggcgtcgttaaggagccaagggacaaccatcttcacctctggccttgaaagatgtgaatatgaaatgaaaagcagccttcacttgaaaaggttgcaagggagatggatcagtttcagttaagtcagtgtggacagggaaacctttcaaaaggctgattatacagggcagttagtttatcatgaacaggaatttcaggggacacagaaaaaaggcttaggagagagggaagcatggaaattggctgatattaggaaacgtatggacccatatgggactgacagtttgggtgataagaatgacaggcagcttgagcctctgaagcaatgatgtggggcatgagggatgcattgtgatgatctttggagggacgtaggtggacatccagagcacctggctgttgttacctgtgctcaggtgtgccttggcattaaggcagcttctcggctttcaccccaaaaggcttcctcagtgttagaggcttgtccatttcagatagttataaatatgaagccatctaatacaatccacatgattttaaaaaatattttggttcatccaagttctaattagatcattaaatgctcagtggagctaacccatttcactgccccacccgtagccttacacaaaacttccagacaatgacatgtcacccttccctcagaatcacctagaaaccatcgcagttgcttcaggactggacaaagagcttctagagaataagcagaaagaagagaggtgaaaatactgaattcagggaaagaaaaagactagggagccaggaaggaggatggtggcagtgacctgtgccccagctcctttcaaggaaggcagaggcaacgctcatttatctgaggggcaaggctcttggatttgcagatttaggtgctaccctaacactgtttctctgggatgagagcaaagagtgaaataatttacagccacagacaaccctgctttctgcagtgcgctccatcaggagacgcttcaccaccctgtttccatagtctacaggagtctctgaagtcacatcagctgtaggaactcttgtgaggaaaacagcctttgtagccctcccctgaaaggggagctacactggaagtgggtgctgctccgtgtcacacatggagaggggacaaggaagccagttgatttggatctcttttccagaagattccacaactactagaagatgagatgctttttggcattgggtcacctgaaatatctggaaaaaaaaaaaccaaaaacttcttaaactgtgcttccggatatgatctgttgcttgttttttttgtttactggtttttttttttttttttaggtcttgtttgatgttgcctctttgcatttgatttcagccatcttgatagttttttctatgcaattaacaaggtccagccctttctctagccaattcacttcatcagtagctgacagatgttcagggatgaagaaaacattattagcaacagaatagagaagaaaaacagcagggtcatgggggccaccacttaggctgtcacagatgctctcaggctaactacctgcaaatgaaaaaaaaaggaagatgaagattactgacaatctaaggagtgcttcttttttgaaaaaaatttctaatgcgtatagaaaatgggacattatctgcatagcaaggagaaatggctaaatcataagctgatgttcctctctgacgttattatagtttttttaatccaaagaggaagttctataataaactatttttcattagtttctaaaagatggcagaggaatagtgagctgaattttcttttttttttttttgagaaagtctcattctgttgcccaagctagagtgcagtggtgtgatcacagctcactgaagccttgaacttctaggctcaaatgatcctctcacctcagcctcctgagtagctgggactacaggtacatgccaccatgcccaggtaatttttttttaattttttgtcgaaatggggtcttgctgtgttgcctaggctggcctcaaactcctggtctcaaacgatcctcccacgtcagcctcccaaagtgcttggattacagacatgagtcactatacctgactgaattttttttaatagaagggaataagagaaagaggcagctgggtattgtggaaagcgtggtcttgaaagtttcagccttagttctaatgcagcactgtgggttctctgcctgtgtggatgtcagcaaaagatggcacttctttgtggctccgaggccacatccatcacttcacagagtggacagagaattaaccgagcagcaaagtgtcggtgccgtggtttggttcactgcagtagctcagtgaacagaagcctgatcacgacccctctgctctaggagggattgagggagaagcccagggagggagtccccgaagtgcttttggctgagatgtaacaaaagctataatttatggagtggtgtggggaagcaaaggagacccaagagctgtacctgagtgcccccaaaaggatactctgggaaacactatgacagcacaaaatcaacctccttagcttggaggacctgaaagggggccacatagctcctggatggctggcaagcattgactcattttgacagaacatgtgccatttttctcagacttgagttttacctcggatccctgtacttcacatttcttgtagtttttaaaattagattcttttcttctttttctatgaaagcatgcaaattaagcatcagagtgaagcagcctgttctctcctacagaggagaggccttttggatggtgtttcagtggtgggggatgtttacgcttggtttccccatagccacacttctcaggtgactacccatgttcctttaatgtacttaacatgcagtcaacagccagcaagaaaggggaagttcactggcccttctggggcttgaacgtgcaaccgttccttcattatagaacacttttctacccaaatacaggtctcctaacctgcagactaacagaatacaatatctatttcattatactctcccatgacccattatttaaattcttaaaatacgagtttattgaaacttctatgaattttatgctttaaaatgaatactttttgttcttaagagaatccatgagcattcacataaagactgaataatttactccccaaagaaataaaatagaaagtatagcagtgagtcaggattctacctgcataacgcatactaatgaaatgtattttttgctataatctgataaaatacaggagaaaaacagttattgttttccttaggttcagagtagtattctttgtgaatatttacatttattttcaaatatttttgcaaatattgtacaataaattcaaaattattttagttgtctgtggattattcactttatgaaagcatatctagaaatttgcaaactatttttaatagcttaaaactgtcagtatagtttgacatgtaaatattagcatatctacacacacacagatgctcactgtgcattccatagacaaaacatgcatgagtgatttttccacttttgagctcagttgagggtggactctatataaacccagttcacattataaattaatcacattcctccaagttagtctgtttataaaatgctattcaatattgataagtaaaaaagcccttggaaccaatacaagaatatcaagggaagtgtttgttcccttccaccaactggggtagatttattagttactttaccattatcacacatattttatactgagataaatacagtattctgtattagtgctagtttgtcacaaatctccattaatgcgctttcaacttcgtgccagtaaatggttaaaaggatctatgaaaactgtggattatatctcgaaggtaacttagtaaggatctttgctaatgatatgtaattacatgactaaattatttccttagtatattaagctttctacaaatactagcacattctttgttccaggtcagtgtttttcttataaatatcacaatgttaattttgaaaagtaatactttcaataggcatatttcaggtattgtgtgtactttttaatcatcagaaattcccaggcgcatatgttaaaatatttgtcttcctttgaaaaaggaattgtatgctcaaatgctcttgagtttatcataaacaaaataaataacaataatttttaataaattccctagctaatgaatggaaagggggacataatttttaaaattccatcaatatttgagaccactatgaatgcagtcaacaagaatttctaaattgttattggacgttgtccatacattaacttcttccgagataaaagctattgtcatagtaataaaattacctaactaaattaaatagactaggtgatgtgttgtcaaatgagaaaatagtcaattacttaagagcaacttattttaaaaaattatttttgtaggtaaaataatcctgagttactgttattaatttccattgctattgattatcttattagaattatttaattaattgtcacttaatggagttagattttattaatttataattatttactgtccacaaactattgacaagatactatgccaaactcaggccatgtggatgcacaaaaggatagaggaatgagtgcaaaagtctgtaataaggtttaaagggcttggagcactttaggtctcatgcactcaccagatttacccaggcaaaggccctcctcaggacaaagccccacactgagcagaaatttgctcaaaatagaagagaaaaaaaggaaggagatagtccggttaaaaatggggtaacagagttgtgagattgcagaaaggaagcccccatatttttgaacactgcctaaaacaccagaacagaaaagtctacagtttttctgaatcctacctctttgtaaaatttcaggagaactaatttcatgtaaaactgagcaacagcaaaggaacaaggtaaaactctaacagaaaagaagcaaggttcagtcccgtacagggctattaaaatgatgcagcgaatgtagaacaaaatagcatccttatggacaatggaagaatgcctcaaatcaaaggaaagccaaaataaccttttcaaggtgaaccaagttattaggaaattattaggaaattacacaaatacatataatagatattgtcttaaaagaaatagaaaatgaaaagtgaaggaaattctaaaaaacacaaataagaaaattaaaaagggatttgagataagctgttggaattagaagtgaggtaaagaagatccaatatatgtatactagaaatgacataagaaaaacatcaaagcaactgaacaaagtgaaccctaaaaactaaattcagtacaactttcctgacacagtatgcttgtgaaaattgatccagaaatgaccagcaccaagatatactctaacaaaattcctggattctaaagaaatggaaaaaattccttgggcatctaggcaaaagagggcaattaatttacaaaggaaaaaaacattattttcaggcttatccataatattttataccagaagaacatgaagtaagagatttcagatactcaagggggaagtatgtataaatataagtgtgtatgtatatatatatatatatatacacacacacacacacacacacaatccctgtatgtatatcaggattgtatattccttatatgtatactgtaagaaactataattccatatattctttttatgtataatataaagattttttatgcagccaaactcattatcaagaataaaagccctaaataaactgttactatggaagaactcagtgactgtatttcccaggaactcttcctgaggaatttactagagaacaagattcaagcaatcaaaattactgggaaaacatcaaccatcaacataagtactgatggttgtgcctgcatgcgtgtgtgtgtgtgtgtgtgtgtgtgtgtatagaagtaagataacatgaaggttaagagaaagacagcatagttcgaaatggccgcatgtgttaacagtgtggatacagtataattattttaaaaattttgtgggagaatgagtagagcatatgaaaacatatttgaagttttcagaaatcataggcacagtgatggtattgttattctgaaattgtgtaatgtgagaaaaagcaaatgagcaattatggaatattgtaattatgtcatcttctgtgttcttgagaaccagtgtggaagaaaggagcaacagaggtaaaacagaaaatgttaagtaaaaaccttgtagttctgagatacctgtccttcaaagtgagaactgagaggacttagaaacaatgactaacttaggagcactgaacatgcctagcacccaatttatggtcttgaaatttttaagaagcagtgcttcttttaaaagtaggcaattcctggcctggagcaggaaacgtgtaagatgaacctgagtaattttccatagcagatagcgaggaagctattgaatggtgtcaggatcatgttatggaaactcatcttgataggattgccattggccagagatgagatagttgtgcatcaagaaggaaatcactgcattgagttaaaacacacttaacacataatatgtttaagtttatgagtttataaatgttcattgaaaaaaaagattcaaatattttatcctgcctttcctattcatacaataccactggataaccaaaaaatagaagtattctaactaataaatgaaggaatgtttgaattaaaatatcatttttcaatcccaataaattaatctagttactgaatattaatgactgctaagctttcaagaagagagaaagacattatgatcttcctgatagaagtacaaaacaccatctatgaagtagtattacagagagacagaaagaaggaagaggagaaaggaggacagagagatagagggagggaccaaaaaaggaggaagggatgagaatgaaggaggaaggaaaaaaggaggaaaagagagggggtagggagagaggaaagaaggaaggaaagaagctgaattaaatgaagcctatagaccaattatcaatttataggaaaaaaattatccaggtgcattataaactgcaacattggatacaatcagcaaaatgaagactgggaaactctgtaggtcacatgtcctgctttcttcaacagataaattgcaaggaaaaaaagacaatggagggtgatggactaaacaacacatcttcaaaacagacaaaatgaactgtagtgtttagaaatgaaccttgagtgataaagaaaaacaagagagtgattacaactttgggaggctgaggcaggcagatcacgaggtcaggagatcgagatcatcctggccaacatggtgaaaccccgtctctactaaaaatacaaaagctagctgggtgtggtggtacacacctgtagtcccagctactcgggaggctgaggcaggagaatcgcttgaacccaagagatgaaggttgcagtgagccgagattgcgccactgtactccagccgcgtaacaacgagactccgtctaaaaaaaaaaaacaaaaaacaaaaacaacaacaaaaccatggtgtcttttaggaaggggtgaaggtgttgtgatgagaatagatacatggagggcttcaggcggacctggtaaagttctgtgtcttggcctgggtagtgtttaaaaagttggtcactttataatgtattaagcttattctatgtgatatttacaataaaaagttttttgttttttgttttttgtttttgttttttttcaatgtggaaggatttggacaggtcaagacaaaaaagtaggttgagcagttcggtgatgcagagctgagggagaggggcttggaggatcaccgtgagatcattcacagtcataggcggaggtgaacagagctgagggagagaggcttggaggatcaccgtgagatcattcacagtcataggtggaggtgaacagagctgagggagaggggcttggaggatcaccgtgagatcattcacagtcataggcggaggtgaacagagctgagggagaggggcttggaggatcaccgtgagatcattcacagtcataggcagaggtgatcgagagatgtcccgcttccttttacaattccggcaaaactgcaaccaaacttaaatccaccattctttctactttgcctttgcagctcagtgttggtgcagagaaacagaagactctgctcacgagttttcctttaaattcatcatctctgacctcaggagggcctgggtgccgcccagcagtgataccgacttcctccgccctccccttccttcatcactcatacgtttcttcttcctcaaatcccagtacccctctgcctgtctgcacctgggcctaagcactcagccgggcctcctcttcctaaggatggctgcctgctctctgaaggccaaccctccacacatcctttagatcctcccctccaacctactcaaggacagagctctttctctggcttaaactgtccatctgcgcttctcgtctcagtcctgccttcagcatagtatcatatcgttatttctccattttcgaaaatcctttacaaccccagagtcctatccaatggcctccccgatctctgctcccttttactggcaaactcctttaaaaaagtgtctattctcacttctttgaatttctctcctccgagtctttctggactccactccaaaggcttttggctccatgactccactgaaatgacttttcaagaccgcaatggcagccacacacccagctccaaccacagctcatcatggcagcctccttgagatgtgttcccttggctttcgggacacctgagtcctcctcagttttcacctgcctcataggctgctgctccttagtctcctttgctggtgttttctcaccttccctgcagaggttggataatcacatctgacctcataacatggtcagagtgtcatagatctaacctagtgtcgagctttacgaataatttcaaggatgcaggtaatcctgagactcaggcaggacctggagacgttcaggtcgccagcgcgcctccccaggtccttccttggcatttggggctgtgctgtgggcaagggttatgtatgaagcctctaagaaatctatgcagtaatcactcacaggcaatctctcagttacataaactgtctcatcattcattacctgatgaaatatcttcattgtatcctctggtaattgcacagcttatgacactgtccagagaaccttaccccataaattcagagattctagtttgtttgccatccgaactcttagacctcttttctggtaaaggtgctgtatgtgtatgccattcacacgtttacaaggaggccaggtcatctttttctttctttcctggggacagaagaatgagaaaatggattagaggctcaggctaatgacttcaaaatttgtacccaggacccatgcctttctcctaaactacacttatttattcaattagatactggacattttgacatcgctgtgtaatagcttatcaaactgaacacgagcacaatagaaataattatttcatgcctcaactccctacacacacacacacacacacacacgtgcacacacacacataccctttcttctaccacagttgtccccacccctacccgcctcctgtcttctcaggaaacggggaactacactccactcacagttgactcctcttttcctctcacaccaggcatccaacctgactgaaaattctgcaacttctccctttaatttatacccagaattcaaacactcatcctacctccagcactaccttcccggttcaagccagtgccatcttttgcatagatgttgacataagctcctagcttacgtcatagatgttgacataagcttctctgcttcctgcctacaccctggccctccagagggtattccgaacatagcagccaggtggatgtctttaaaatattagtcaaattatgtcatgcctcagcctcagagttctgcagtggttctggtatcttccagaataacacccagggttctgaaagcagctgtcagggaactacatattctagatcctcacaaactctccaacttcaccttctgtttttttccctccttgttctctctgcctccgccccactgccccccttgttgtaccctgaacagccaaccacatcagcacactggggctctggccccttatagtattctctgcttgtctggaatgcttattcccccagggatccatgtgacttgcatttctaatctccttcagacatttgcttaaagacacctgctttgtaaggcattctgtaatcacctctttaaaattgaaatctccaccttctttggactctccctcttccctgttgattattttcttcctcacttagcaccattggaaatcctagacattctaacctctcggtattgactgttacagtgctgtggatgaaggcggagaagtttgttcattcactgctgtatccccagcgcctcgatagagtctggaatgtagtaggctctcaataaatgttgcattatttaattaataattgagcaaacctatttgacttgatctgagtttatattacaaataatgtaagatcaaaagtgtagggctgccacaaagaagaccttgaaaatggtctgatggagtttggaatttatttgcaggctggggaaaccattaaaggaaattgagcaaaacggtaccaggaagaaatgacatcagggacacaagaaatcatgctttaagaataagaataatgataaagggaaaatgtgattgtttaacattagtcttcttctagctcattgatattgtgtgggctgccaatattatgaggtggaatgctgggccgattttcaaaataaatataaaaccttgttgaattttaaatagaggcatgacaatatattgctttataagattgatagcgatgtattaaaagtgttcatcatttaatacataaatatgttcctcaaaatgtatatgaaataagattgttaaaatacagttggtagaagcgatcttataaaatacaaaactttggaaaatctattttctgaagacaaaaaagcaaaaagtaaacacacttatatgtcttgccagttgaatttggtagacttttactgcattgaaccatattcgtcctcccctatcaaccccgtggccctctccctccccctacacacacacacacacacacacatgcattattttactgaaactggttaagcaagaaatcccatgcactgtagctcctaaccctttggctgaaatttgcagtcagtttgaaagctcaatctgctttttgggttttgcagtacaaccggtaccagcagtatggtgcagaggagtgtgtcctgcagatggggggcgtgttatgcccccgccctggctgtggagcggggctgctgccggagcctgaccagaggaaagtcacctgcgaagggggcaatggcctgggctgtggggtgagtactgcccacacccctggagcggtgtgttcctgtccttgtttgcttttgcacatgggctgggattatatttttattttattttcattttccctttggacttagacatctttgaacttacatataagaaaatagattttaaattcctttataggactccagatttgaaaatttatgtatttattttggtgaaaacagttatatgaagattttctgctttggttgcttatggaagtatttactttaagatgctgtgagccactaggccagacttttaaacttttctcccagcactcagctgatgcagagcaaaaatttattctttcttcagagttgcctttaagtagacaggagtgaaggagaaagaattctccatcagtgacgtcttagtgacattgtttgcctgagtatttcaagaaataaaatgaaggttaatgtggaaaacttgaaatgttattatgtcataaaaatcattttaagtagagatgaacaaaactaatggtgtctcttatggaagcagaataagaaatgtggaaaatgtttgttctaagaggtcaaaccatgtgacctggccggcttttcaaatgaatctatggctgcaagctgatggctcaaggggggaagaagcataactcaaacacaaaaaggcttactaaattataggttaaaatgacaaatggataataatcctgatattaaatttcatgcagcctggaaaagtgagaaagtgtatgtgcatataaaagtctattgaattttgatgagaaacatttcttttaaaattgcaacttcatgaggagttttgtgcaagaaggagcacagatagcagagttgtattagccagtcttgatttggggctgagcactgtaagtcatctagaaataaattagcattggttccccttagtaaagcttcctgtatgtcatgcagtggggctcataaaatcctgggttgagcaatggagtagaggaagtggaagttgaaaaataatgagataccatggtgcctaagtggaaagaaatacctctggattcataatcgtgattgcattagaatgaaaactcaagtgtttactctccctggagacgatggaaatcaggacacactctccagccttagtcattatcatgtgctgaattatctgcaatgattgtgtgtggcctcagcaggttgccaacctctgggatcagaatgctagcaaatgttgtcttttaaaatgagcttttaatgaattgtttttaactactggctaaattatgtgcttctgcctgctaattgcctactgtggttccatcctctaaagctggattttaagattttaacttttcttaggaggtagagacttttgctggcccatcttttgcatttggttgttgaccttgctttaagaatgttgaagggtttatgtaatgtgaaatcttgaatatctttatcttcccttttttatacaagtaaattataagtaaataacatacatacttaagctgcaaatcatgacaaattattttagaagtgaatcaaaatgctgtaatgtctttggattaaaagagtctgcaggcaactttacttaaaggaggatagttatgttctcaaggtttctttgtcctttggcaattgtaggtagcgtattcttaatttatcttaatttgtttcgatttgttggttttggaggtgtgtttgttggtttgtgtattagttatctatgactgcatagcaactccaaattctaacaatttaacatgatagaaatgtatcatctcacagtttctgagagtcaggaatcacccgtgagtggctttgctgggtagttctggctcagggttcctcctgagtttgcagtttagcagggtcacagttatctggaggcttaactggggctggaagatctacttccaaggtagctcattcacatgactgttggcaaaaaaagtcctcagttcctcactggctgttgtcagaaggccacagttcctcaccacatggcccttgtcttaggctgtttgtccccatgatggcagctggctttccccagagcaagttgtccaaaagagagaacagagagaagctacagtgccttgtaggaccaaatccccaaagctgcacctgtcactctcactttattcattagaagtgagatactagatccagctcactctcaaagggaagggagttgggctccatcttaaagagtgtcaaagaatttatgaacgtattttaaaccaccacagtttgcaatttgaagaagctgaaaaaagaacagagaagtgattttctaaaggatgcactgaactgtatgccttcctttccctccctgtctttttgccccagtctccatacacttttgcaagcttatgtccattcccattgctttggcttctcagcagagataaattgatttcatcattgccctttgtcttcaaatcccaaactttcacagaaggatattcacctaacttgaatgctaaaggaattccacagtgatttaaaaagggtggcgttgaatgtgtgaagttcaaaccctggcttcacaaactacttgtggttttcatctttctcggtttccttatctctaaaatagggtatatatgagcaactctgtataaaactattgtgcatactaaatgagataataagtgtaaaatacttagaatagttcctggcacagagttaagtgcagatttatttaatatttaatcaaaagcttaatgaatatttatccaaagctcacccaaaaacccaacattcaaggaagattgcttacatggcattcattggatatactcttccaaatagtctagaatccaggatgtagtcagatctacggcaggaaactgggcacctagaccttactatttttagcctttcaaataattgcttttcctaaatactactttgccaccatgccatttgtttatattgtgatcgttacacaggaaatgtgatgcctgtggttcaggacatcccaacagacttttccacaaggaaccatggtgactattcaagtctgatctgagtaccaggcacatttatgcttgtcctgaggaaagttgcctttaaggatgttaaaccagctgataaggttttcctctgacagttgactgctagaaaatctaaagctacatctgtgggctccctatagcatatatagaggtcataaacacagtggatttggaaactggtttcctggctttacttgtttccttctttctcttccccttttcctgatacatgttgttttgctgtggtttgtataaccttgtaagctgcccatcttttctgggtttaaggagtgtaatggaaagccattgtctggaagaaattgtggttagattatgtcatttcagaagtagaacatggccaaatacataaaagttagaagaaggtgaatctctttttactctttgctctcacagtatggacaacgaagaacaaaataagctgcctcagggagaagtgagtgcctcattcaatacatcgttcaaggaaaagtcattggtagcaaagctatagaagaattacagagttccagatgtggaaaaagccctagacgtcattaactccagtgattatcaggatgtggttcacagatttattgtaagatgcctgtgaattcacccgtgcttaatttttttttccctcaattatcaagatagaaaaagtacaactcttaccatgtgggtatgcaagaaatgttagctgttacaaaaaaaatcgcgtataaaaaagttgaaaaccaaattctctgtcatttgtgggatttaaaattgttcggagctagacacccatgtgttgagctctgggctccagaggattctaatcttctagtcatttcacccacgaccatgtacctgggtggtcttccgcacagctgtggtttctgttgtatatcctttccatttgaaggcttctgtgtctttagttcagcttctgtaaaataggtgctatagttagtatttatgactcttttgttcaaacatatgggaatgtccattggaaaatcagattccagacactttgctccactgtgtcacaggcttatctgttccccgaggagcaatgtaccttaactaataaatgaagacagggatttccatttaagtgatgatgtcagtccacctaggaaaggcctgataaatgtggggtggatccagtaaatttattaccattataaagaattatttgaaagtactacctcccagaattcaagctgcagtgttacagtggtttcctgtctttatattcctgtcctaagccttttcattcttcttggtgaatcatgtatttggtgtttaacattcatcaaatgtatgaatgaatgaatgaatgaatgaatgaatgaatgaataaaataaatggttgagtgaatcttaataatctaggagtaatatcaacaaactattacttttattttccaatattaatcatcatttatcccagtattagaactgcttaccttgccccaacaaagagctctttgaaaaatacgtaagcacctttatatacttatacaatatacagtgttttaatagcacacatagtatataattcagaaaaccaaaataacactatgttcagggatccacaaaaagtccattagaaacctgaaagtactgcagaatttacagaattggtgtgctctatcaaaggctacatacacggccaagtaaagagtacattctgatatgtaaaatgtcttactcttgggagaactgagatttcagttttgactcagcacagaatatttttacatagatagaacgcagcagagaatgtattttggtaccaaatactagtctagcctcactctgctaaccctagatcctatttttactactgctcataaaaaaattaattgatttcctaaagaattcatgttatgcattattctttttttctggccttattgctattcatcagaactatctcacaaactttaatgactccgatgcaaaatgctgacgtgtttagtgctggaaaacagcaacaaaatatggaatacattatactcactgacctgggaatgcagaaagctatggcaatcaaaccttctgagttctctataaataaaacatctttatcttatttgatattatcttggggtattacatgtctgggtgataatttattaaaataatgatttgaagttggataaggaattttctgtttttaattagaaatccagaaacaaaatgtggcaactgcagaaaaatacacatttaaatgaaaatcgaatttcaaaaatcatattagtgaccataagttaaggaaatgcgatagaatttcttaaggcatctaacagtcactctgtccttaaacaaacaccatgctgtgtcgctcggaggcaggtttgtcagggaactaatgaggcattcaccttgggctcctcacttgcatggaccctttccaaatcctcttaaccatgttcatcttcttgcattggttttcttaaaaagggtttcgaaaattataaaaatgaagttgtaaagcctccctcaaatgtggttttagacctgtgcaaatacaggatatgacctacttcgtgcaaagaaacgtgtatatgtttttggtgaaaatggttattttgaacgacttatcacaacagcattaaaatactgttggaggttttagtgaaatgagagtctgaacctcattttcagcctttaacgtaggaaaggagtcaatgaagataaattatgatgatacctacccttttactcaaagatttaactaattattgagtttaaaatccaaattaacaaatagatgtgaagctcttttttcaataggtggaccttggaaagagaaaacatgtagatgatcaatatttaataataaaaggaaaaaagaaaatggttacttttcttattcaagccaattttaatttatttttgtaaaaatatgtaatttcattaaattatgcttagatattttttaaaccatattgagtttttttaagactagagattaaaatctagtctccaaatatatgatgttttcagggagacatcagaaagaacaggtgtttctcaggatgactaactgtgggttcatgagccttcactccagctgtccccatgtaagtttgcctcaaccgcctggacactccagcacatagagactggaatcaaatcttgttggtactttaggctttgatatacaagatgttcttcatcaaagagcattttaaaaaagaaagttggtgttatgaaatgtcaaaaatatgcagtccatgtttatttgacatgtgtccaaaaatctaatttaaactctaagatcagctcatttgcagattggaaataagcctcgctagactttctgcctgtgagacagcttgaagtgcaaagatggaaagctttggagagtatttattttagttaaagaaactgttcacaaatgtacaaacaagttctgcataccattcatctggaaagcatctatcagttggcagacattcctagaaagtgttccgtgattttgaggtacagctgatctttgatgagctacggggagttgaggggtgccaacccctcctgcaactgaaagtcggcagatagcttaaacttaactacaatgatccactgttgacgggaagccttgtcaataatataaatggctaatgagcaggtattttgtatgtcacatgtattatatactatattcttatgataaagtaagctagagaaaagaaaacattattaagaaaatcataaggaagagaaaatgtattttctgtttactaaatggaagtagatcgccataaaggccttcaccctcatcatcttcatgttgagtaggctgaggaggaagaggaggggttggtcttgctgttaccgaggtggcagaggaggaagaaaatctacatacaagtggacttacgttctaatacatgttgttcaagggtcagctgcacatagaaaagtatattttttaacccaacacagaccactagctattcttattgtctttagccagtttttgttgaaataaaggtaaatatgaaataattatactgttttttttttttctttttgagacggagtctcgctctgtcacccaggctggagtgcagtggcatgatctcggctcactgtcacctccgccttcaaggttcaaacgattctcctgcctcagcctcctgagtagctgggattacaggcacgtgccactacgcccagctaatttttgtaaatttagtagagacgggattgcaccatgttggtcaggctggtctcgaactcctgacctcaggcgatccaccctcctcagcctcccaaagtgctggaattataggcgtgagccaccgcacctgaccaataattatactctttcaaaatcgtaagatccatctttttgaataatgtgttagaaaatcagttttatggcaaatcgattggagaaacttctttagctttataagctgcagagagctcagaacagtcctgaaaacagacttcttgtgaagattgcattgtttctgtgtggagagcattgtttctgtgcatttattttggtcgtgctctgacctctgtctggggctgtgtgtctgacatggcagcctttagccacatatggctatttaaaagtaaatataattaaaaagtcagttcctcaatcacagtaaccacattccaagcactcagtggccatacatggcaagtggctactgtattgaacagtgcagatatagcccattttcatcactgcagaaagttctactggacagttccagtctggaaaaggacagggacgtctgtccaaggaataacatttgcaaactcaggtttcctgtgttttcaacacaagcactttgagctattcagctgtagttgagggaaaaaaagaaaaaaactttccagaaataaagcaatttcttgactacaaaaatatagagcagcattttccagagtacgggtcatgcaatccaggttccaacagatgctgccaggagcagggcaggagttggggtacagagaggtggagcagagagctgcaatccaagagttggaggcaccaggtaagccagattaaaccaatttctttcctataggacttaaaactttcactatgcaaagatgtattgcttgaacaagcagaacagcacactcagcatttcctaaactctgtagagcaagaactaccttttgtgtggtacattttgtaagacaggtgttttatgaagcaacttgggattcagatggcttgctttatttttttaatccgtagtgctgagttgcatactgctagtcacaatgagcaagtgatacccaaaaatcagagccattaggcccacaatagttcatttctgtagagaactaatgaaagtatgactttttaaattatatggtttatttgcctcaaatgtatttttgagactacaatttatttttacagtaaaatctttttctttctaacactgccattgatatatatttttatgggtttaagatcaattagagaagatgggatgaaattttgtgatcgtgtatgcttagtaactcttcttccaagggttaattaaatgaatatgagagattttaaaatttcatagaataacttatataatgataaataaaatattttcatagggcgagtgtcaccatgtgtcaatctcaaaaacattaactgcatggggcattatgataataacaacaaaaatgacatgtagattgtgtttttgttttccatgtcagaagaagtgcttctgcaaacagtgagaacaatcctaaggatgtagtgcttgggtccagtccagctggggcagacctggcggccccccaccagacaggcagcttgcatctccccaacccccagcattctgaatggtgatcttcccctttccagcactattttgtaatagataaaaatatggaaacgatccacttttccatagtattatagcagttaagtatgttcttgacataattatacagtggaatacaatactctgttatgaagagtaaggtcaatccgtgtcctgatacggaatcacttttaatacacagaatgaagtaaagacagcatgaaaaggggatccatgcacatgagcatataagatattttctggaaagaatcaaagacaccccgggaacagtggctgcctttgggtagaggaagtgatgatgtgagggaggaagcttttacttttcagtttataaccttctagaatgtttgaggtttctgaacatgtagttgatggttacttagggactgagtttatgaattactttttttcttaattaaacttagtaatgttacatgttaaaaataaaagcaatgtgaccaataattattattaggtagaattttacacctttttaggcaaagtgtttctttgaggttaaacttagggagaaggaaatatgcttttcactggcagagaccgagggcacagaaaccaactccgtgaaggctcgctgctgttccagaaagagccaggcatgcaggtggtggtccggctggccactcttaaacctggaatgcgtcaggagcaactctcctgtcatacccatgtagctgaatgtcattttttaatgagaatgaagtccactgggaaatttaatttaccttcgcaaaatagggtctctgaaacatgtcaccaaatgtattgagcagccaatgcaaatcagtgatgttttaattaaattacacaaaatgtttaaatagtttaaatagttcttacgttataggaaaacgtatcccaatgcaactttgcacatatctgtattctagcaatcaacttcctacaggggattttagtgttgtttttgttcagctagtgccccttgggggtaagggcagagattgtctagcacatgccaagaacatcgcatgttagcctcatggcatgatgaagaagcagcacgccctcactcttcacacgaaacaggaacaccaaggtcagcgctaagtacctgctgttattcctgttgttcatgacatttaggcagagttcaagggagcccacacagaatgagcactcaggactagagtgacaggcatttctctcgcttgtccaacattccactgggaaaggctaagtcgatcagttattcaatcaaatctctctacaagctcctgggaggtaatagggcttttcttgggtaaagaccagccagtcccatgggcactggtctccaaggatctgcaacagatgtagaaatcacatttcctgagattccaagaaatgcagccatttttcctccttctccgcttggcatctcagtgggccccaggattctaccagttgaagtcctcaaagactcactttggcctctttttgcaccaagaagtggaaacttgaagtgtcccctaggcaaatctgatctgtcctggcttgacctttagtcccacctcccctaagatttggaggtccttaggaggtacacctggcagagctatccaagcctaccatacaggcctttgtccccactgtccattaagaagttgaggttgtggatagagactaagaaggagatttcttaaagtccaatttatttaagaatttttttcaaggagaagaaaaatatcaagtaactacaaggccatgggtaaggcccaggtcaaatgtataacccttgcctgtctgtttgcccattcttgaaccaggatcagaagaagtgtacaagtgagaaggaacccagtcagaagcagataagcctcactcttgcactctaggaggtaatttgtcaagcgggcctattgctgcacttccaaaaagcaattttcttcctcctttctgtagaagaaggccaagaatgcctgtttctttatccaatcaaagttgcctgttactctccttcagacagaaataatattgttcctgacacacatcacatttttcttcacaaagccgtgttggttattgaccagagttcagggacagtctgggaatttgatgccaagcgattttttcccaattcctctcaaggtattagtgctaaactggcagggctgtaatttggaggaagtctgtgttcactcttcccgtggccgcctccccatgtagacaaacccagtccacttgcagaatgtgacatatgcctaaagaattcttacacacattatcaaatgcaagcttttgattgtgtcctaagaatttgaggccgggcgcagtggctcacgcctgtaatcccagcactttgggaggctaaggcgggcggatcacgaggtcaggagatcgagaccatccaggctaacatggtgaaaccccgtctctactaaaaacacaaaaaattagccgagcatggtggcgggtgcctgtagtcccagctactccggaggctgaggcaggagaatggtgtgaacctgggaggcagagcttgcagtgagccgagatcacgccactaaactccagcctgggcgacagagcaagaatccatctcaaaaaaaaaagaaaaaagaaaagaaaaaaaaaagaacttgaagcattgttctttatttgtacaagcctgcattttgacttgccctgattatctgaaggaaatagaagagatagtccagtcaacttatgttagtcatttgcatcagaaataagatgaaattttatttgctagatttttaaagaatgtagagcttggaatggatgtgtcctgaaagagaaatttcccagtgattaatcaaccttgtttagaccattcatttaaatggttttacatgtaaataggaagtacgtagaaaagctatgtgttcagaagatagctgctatttggaaagaaagaaatctaaatcaaagtaggcttctcaaaaactcttttatgtgaagacatggctgggctttgtataagcagtattgtattgttgtaaagttcagaagatgcttaatcaataagaaaagttgaagtagaaagataggattaaagagataagatctttgttagactaaatctattgacccagaacttcctgtaatgggatggatgggaactgcttcacattgttaatgtaacagaggttttcgatctcaaaattgctgtttggaggctatgtcactgtgtctatttttagtttcttggtctaaagaaaccaaagattgtttttgcaagacctcagaaaagcacagaacttcccttgtaaacatgatttagataaaacacttactgggtatgcttttaatattctgagcatcacattaaacgtcactgatgtataatcagaaatctgcagggacacaaactacctcagaatgtgaataaaatagccagcatgaaaccgactctataggctatgcaccttccctgtacaaacagaactgcttgctgatagagcatgacccccagcacctggctggcagctggcaggggtaagtttctatcaggtcatggttagaatctctgtgtgcacagcagacagactgtacactaaaatgtcggtttccctcctgacggccatctccccctttctcttgctaacagaacagattttttttttttttcaagtgtggaccagtttgggaaatgacctcattttccgggtcagtagtgagttctgagtagtctaaaccagtcttgctaatcccttgacccttactagtgatcaggtttcagaagatccaggcccttctagagttcattgccctactgagttcatcagctctgaagccactccatggttggactgcctgtcatgggatatgatacatttcctttctatttaagccagttaaattggggctttctgtttctccaatcaaaatctcttaatgggcacacaggcatttatttctcttaataatgaccaaaggaattcatttactaaggactttgggcagatattggggaaaaaaaagaagtatttgatgagagcgttttagtagcaaacaaaatcacctccagattattatattccataatatggttgtgtccactgtaactgtaatcagcaataaaaaaaaaaaatctttttgttcctctctggctaaatggattgtagtaggctccattatattattctgacgttagttccgtggtgtgtggccagttcctaagactgcagtggcttaaggggatgggagtttatttctctctctcataaaatgtctggagctgggatgctccactccaccaagcctttagttgccctcatctacatggtgcaaggtggctcagccccaggtccacttttcaaccagaaacaaaggggaaagagaagaggacattcccagtctctttaaaggtcaaatctggaagtagcacacaacatcgtactcgtattccgacagagaaaagttacttgtgaggctacatggccagcccccaaagcagttgggaaatatctgtattcggggtgcgatgtgcccagctagaaactgttcctatgaagaaaagggcaaatggatgatgagcggacaaatgtcagcctctgcctcatctggtgtcttttctgtctccttttatcattactcaaataccattcacttgtgtgcagtctcagagtttcatattttcatgcaggaaaagaaaaaagtcttctggcatgaaactacttcttttttatttctaacagaattgagtatttccttggttatctttttttgtaacaatatatatttttcactttccgtattcccaggcatgagaaattagacctctaactctcaataatacccgtaaaattgtattcgccccttctattaaaaggtgttgccacaataaccttctgaagttgtgcagataaatagagtttgcattcagtagtgccataaactgaaagcagaggtacaattctagaaaattctctagttcgattgacatttacacctgctgattattttgttctcatgtcacatacaaaggcactactaaaccatgtagaaccacatgtaccacagactaaagcttttggagttacaaattgaatgtggtatttcacgtagcacttgaagtaatatcagcttctgatttacatttctaacagaagtcctaggagttttagcttttattcttctaccgcaatcactagaaatcacgctgtttttagcaactaagctgtactcataagaaacatgcaccaagggggaaaattcagtatattctttcttatatttaaaataaatcagtaatacttgtaggggaaaattgtttattctacatgcatgaattggttatccagcatgtatgtggctctctgctagatgctacaggcacacagaggtgatgtcacagccactgtgctgaagaaacacgtcatctaatgggaagacaagacatgtctatgcgaaacagcatagccgcatggcaacacgtaactgtgcaggggaatgtcccacagaaatccaggatacttaagggccttcgtacccagtttccgcatcaccttgaacacatctcatagtcacgtgtatcacattgctcgtgtgcataccacttgcccacacgtggagctgctgtggggccgctggtggggtgagcaggagctgccttctattcatttttgtatcctcagcaacgatgcctgcattcagcacactcatcgttgtatcaatcatgaatgatgcagtgagaaaggaaaaggtttggaatcaagaatggggagcttcattaagcgcactgagggatggagaaatttgacctggaagtggtgactgaaatatttcaggcagaagattctggaacagagtgaagggacagaaagctaggcagctgcagagaacacggccagggaggaatgattagccgacggagaggagtcgtgggctcatggtgcctgatcaagagcaggacagggaaagggagtctggccctgtgggttaaggattcagtacttcatcctgcagacaatggaggccaggcaagggcttccaggggaagtgacatgatcagatcttttggaaaaagtaatctagtgtgagggcgaggaggacaggtggaaagggggttcactgaagtcacagagaccactgtgacggcgagtgtcgtgtgaatatacagccttcctaccttataaaacaggaatcgctgtttatcttttctcttcctactagtgaagcagcatcgtagtctagggtaaatccccagggttccttatctcacgccaagaaaattaagtacacagacacgtgggtgggttaaggagtggaaagtttaacaggcggaagaaaggagagaggagggcagctccttgcaagagagagagatgtctgaaaaaaagggttaaggtggcagatcccagcagattttataggcaggcttgaggaggcagtgtctgatttacgtagggctcacagattggtttgaccaggtgtgacgtttacttagcacgcgaagaaggctggtcgccccaccctaatcttattatgcaaatgggctttccacttggtggggctatcttgtctgctccttactggacacgtggctggcaaaaagagaagatggagccgccattttgaacatggctagtcccaggtagtatattcctacgggcacaactgccagcatgtacctgtgcaagcttccagcatgcttgtttgtgtctgcaggtcgattttacaggctgctctttgttggaaaagaaaatgatttgggggctgcttttcattaagaagaaaaccttactgaggacttccataccctcactgcccaagtaatttctttacaactcctgtatcactagtttttcagaaattattttaagaattttagttttgtaatatcatatgcatttaagactaatacctcagggatgtggaagatttagatcattcttttattttagagattatttagaaattgaattcataaccactctctgtataatgtttaatagctaatatggtacactatagaatatttatactcacccatctttattatgctgcataatttgctgccttttttaaatctaaaaatatgagtttaatatttacaagtctgaaatagcaaattttccttactgtttcctcagcatccaccatggtatccaacatacatataattgtataagagggtttcatattgaaaagtcccgcaagtgacaagatttgtagatttataagaggctttctaccagtatttgagaagtggtggcaggtataaagggtggacagtgacagccacccttcttgactcagatatcccagcatccacgtgcatgcaccagtgaacatgaaaaagtgaaagacaggaaagaccttctgaccatgacattccagccatattaccacgtgggcgtctctcccgtctcgtaacccatgatttctatttagcaaggatgttttttcctcaactcatttattcaaaaatacaaacaaaagcaagtaaaaaaaccccacaaagctaatttataacaaccctagatattttcaatgtctctggaacatttaacattagtacactgggaatcacagcctactctggaagagatagagtatggagtaaactcctgagtagggagctgggtccagactcagacacacacactcacacacacacactacatacatacacccacactcatacacacacagccatatacacactcctgcttcacaaactagatccagaaataaatttaccattttaccaatgaaaaagttatttttttgcttaagtgaaccctaaaacttgcgaattttaattttaatccagttagttttacacaaatcacagtctctaggcaaatttttctgcaagaagcatcttgtacttatagacacatagatagattatatatatatatatatatatatatagagagagagagagagagagagagagtgcaagacagagataggatggatagattgattgatttttaatagaactaatcatagtgaaaattttaaattgaaattagttttttgtttcagggaagagtaggatggtgaagatttgcaaatttttaccccaaactccttctttattaaatgcttttggcatctatctaatttccttgtagtgcctgtatctctggtatttgcaaagactttttctatgtatccctaaaagtgggatccattgtaacagttccaaaacattcctcaaagctgttcttttataatctaatccttctcatccctgagcacctccatttcccaagcctggataatagacgcaggtaatccacccgcatgtctgatattcaggtttacaattcccttgctggtaagactgacatgatttttttcagagcaccctgactctttccaaggaataggtgccctagagcagcagggacagtgctcctaaatatcccctacacgtttgcagcgtatatatctatgtccactcacacgtacaagccccctaaagagaaaatcttctcctttgagcctattttggattctgcccaggttcctttctttgggatggtcttactgggccacctaccttgggacacttttaactcatttagttgacttcttccaacactgggtcattaaaatgtgggagtgcatcagtttcctcagcaatgttgctgtgttgctgggcgagggtagggggtggcgttcgcacaattaatttttttttttttttttgagacggagtctcgctctgtcatccaggctggagtgcagtggcatgatctcggctcactgcaagctctgcctcccgggttcacgccattctcctccctcagcctcccgagtagctgggactacaggcgcccgccaccatacccggctaattttttgtatttttagtagagacggggtttcaccatgttagccaggatggtctcgatctcctgacctcgtgatctgcccgcctcagcctcccaaaatgctgggattacaggcgtgagccaccgcgcccggccttgcacaattattattaaggctgggcaaatgatggaacttacggaacttgcattcaggtaaaataaacattattatcagatggtggagtgctatgttctgtttgaagcaataaaatatcccgtaggtagttgaaaatatgaaactgaaatttgatgtgttaggattttggtaaagatttgaattatcattagaaagaaattgttgaagctctctaaaaattggtctgttctctgaagtagagcagcatgacagcctttttctcttaaaagaagcaagccttgggccaggtgtggtggctcacgcctgtaatcccagcactttgggaggccaatacgggcggatcacctgaggtcaggagttcgagactggcctgaccaacatagagaaaccccgtctccactaaaaatagaaaaaaattagccaggcgtggtggtaaatgcctgtaatcccagctacttgggaggctaggcaggagaagcgcttgaacctgggaggtggaggttgcggtgagccgagatcatgccattgcactccagcctgggcaacaagagtgaaactccatctcaaaaaaaaaaaagaaaaaaagaaaaaaagaagcaagccgtataggtcttcttcgacacggaatgaggctgctccaattcctgctggtctccagagcagttaagaaaatggaaagggcaatttcttctaaaagtatgatttttcaaaccagggtacctgatatggaagatgatatgcaatgtcacaggagaaggtgcatttccctagacactgggacaggtctgggtggggaatgatacttttatattgaaccaaacacgtgaatcttcaaaaaatgtctaaatttacaacccttcctttggactatgacctccagacaatccaagtagtttttgttctctttgttctctttcctgtgctgtccaggaacacctgtgagggagagtttgagaagtgtccatttaagtgatggcaagaagcccgtgtgcacagccacggcccagtgaaaaaactgttggctaaaacatcagagtggtgtgaaatgaatgagggttttttttttaaatgcttcttaagtaaaatgcttttgctgctctgttgtttttataacatgctcaataagtttcactactctacaaagtagattaatgttcctgtgttattttattatatatgccgtggaaaaggaactggtccctcaaggattgacattaatttgtgtcaagtggtatttttcttcatcatcaaaatgtaagcaattaaatctccacttctcaaatgtgagaaatatatgaaagaatgtgtaacccatgaaaaattttccagccagagacaaaaatcagttgtaccaataatgtttataaatcttttttgatttcaaaactatttttgtgtcttattttgcagaagacaacttatatgtaggacagcttcttccaaaacagcctcacttaaactgagttgccgtaatcctatgagtagactatacttcgtccaaatatggaggtttagatgttttattactggaactgaaactgtgtgagtttgaagagaaaccagccatttctctgtcccattgctgtgagatcataagtaagccatttcacctttcctgtgccactgtttcccgttcctctacaaaaggaggcctcttccatctctaagactcggagctttcttgcatgctggtattgacattaccagagcagatgggctaatgtgtgactcgcctcactaagcctgtgaacttggtgcttactgcggccccaggtgaggcagctggagggacacagccgtcagccacaaccaggtgtcaacatcatccccatcattgtcttctcaccttccctaaggcatccacttccagcaatcactcatcaaatcagatattcgaagatgagactcttgcctttcaataccctaaatttcactggaacaggaaggcatgcggtgactagggagaggaacgcagcgtagagtctgtggttgtggctcgtatatctcatagacataagacagctgttttaagtagcagactcctaaattaagatattcaaacaagactgttgttgtgaatatcaatgcaataattcaaataaaacaaagcaggattcctgccttctaagctagaatcatgagtcaggcaaactttacttcttcgacccttggtacacggtatgaggccccagagaaggccttatttatttggctccttttttcagttgtggcttaatttccaagaattttcatccagcctcttagattctcattggacttcacctaatcattcaagacaaaaagtcacctccccaggagataattataccatctcctgaggcagtgtttaattccttttactgacaagaagttactcagtgtctaacctcaaccctttactgcagaagtctcaatcccatgtatctcgcaacaacttttcacagcattcttgaaagcaatcagacgttaaaagtatgggtgtgccctggagtcagttgcgtgttatatgagggggccctatttgtacacaaccccatttccacttggacacagttgagaaagaccctgccactctgctgtgatttctaggatcttttctcaatgggagttctccaagttcctgtcttatttcccattttcactggggtgctggtggatattattgagggcttcaagactgctcacctctccaaaagggttaaggcatcacctttccttcatggaaggggtggaggaacagctcctggagtgtatgagaggccacattgcgttcccacagctgtgcacccactacagctatggaagactctgtttctttaacatatcaggagatatttgtagctgggaggtttaccagtattcattactaaacagaaagagaaaaccaaaaactaccaatcagaataaaatcctgtctcaatatgacatggctaagtaaagtcacaaatgaaaaatctttcccctgaggattactttaacagtgacattttatgcatatattatatctatggaaattcttctgtcccacaaatatatgttaagtattttgaaggaagaaaagatttctatcttttctgtcttttcaatctcagattaggggaatttattcaagttaactctaagtctctggggactaagtggggggaaagaaatgtttaaaagcagtgctgtgttaaaggaggcagtaatgcctgtggccttggggtaaactgagctgacctagagaaacggtgtctgtgaaggtccatcagtctcccgcaagggttcttcagacagctgattcagtggcactgtcagaaaagagactccagccctgtagaggccagtctaataaagaagactggagagccggagaatgttctgattagcaatagcttggcctgactaggaatattagagcatcacggaaagaggaaactctcattctagtagtaaaaggaagtgcaagggaagaagatgcagtgcgtgtcctctttgcctccccaccttttagattttacaaggtgctactacccatgggcagatgttcctcactccacccctcaggcagagagaggccacagcacttggtagcagaaggcatcttgctgtgaattagaaggcacccctccctcatgtgggcatagcatccagcaggttgtaaggttcagggagggaaatgccctgtttcccagcccttctggccttataggtggaattgtttgtgtgaagcacaaattacagaaatgtacaccaaagccctggctccaagttcatacttgatgccgttggggctcaagacacttcaccccaaaatatgatggtaggagaccagaacatgccaccccagaatgtacttctttggcatattttgagctggttattctgagaagttgcagacacagaagtgcctctgaatagctgttcttttgtaaaagaaatctatatctataaaggaaaataattgtcataggaatctcatgaaacagagaagatcttatcacaggaggtaagattggaggtgataccttacccagacagactctgtcacaggtgatcacagattcttctgagagatgcactgaaacaacttttactactcctgaggctttctatcggtataacaagatagcctttgttcatcatacatttcctcccctcacctttccataacctgtcaccacctcccagccagagaccccaaacctctattcctttctgtagcccagggattctatataaactccaattacctaccccttctttgagccttatattttgagggactctcatgcatatgtatgtaataaatttgtatgtattttatcgtgttgatctgtctactgtcagtttatttcatagactacattatcgaaccttcagaggataaagaaagtcttttctgtcccctacagtgcttagcaaacatttgcaaatgaatggatgagtaaatgtaaaattatatcagagggtttgctcctcatgtagcaattactgatgctttgagattttatttcattatatttatttatattacttatatttatatatatattttaatatttctattttatttaagatgttagcagagcttctaatggttatagcatgtaaacaagaaagaattagcaagacaggacaacaaaaaagaagacaataggaaaatatcacttaatattttagtttgtgtgcattcgagaaactttttgcccattgttgtagcttaggtacttttcaaagtaagcaagaagcaattattcaatactcaagtacaatacaataagcaactgtaatctgttgaacaggtgtgtttgtgtgcacgcacatgcatgtgtctgaacacatgagtgtctactggaggctggagccagctgtaccaggttcacaggagccagttatgcacatctttttccagctccatgttcagcaacttcatgttggcagcttgaaactgactgtgatgagagtatttatgggactgacctttttttttaggaaggttggaaaagagctggtttatcagcccactattatatgtgagtgatcatttaattgtattcaagcagtggtctttagaagatacacaatactaaattgcttatatacacagatttgggttacaggcaacttaaacctatctttcagttaatcttttctgttatatttgttatatatttgagacattggtataattagatttaaaatatttgatacccatattaataacattatctaagttattgggttgttttccaaaaattactttaaataattattttttattatatctgtaggctattctatagccaagtagtatacagaacatttttagcatctataattagaacacctatttccagattaacatagaagcatttctgatgcaatgcgctgaatagaataattttttaaaatagtatagccttcaaagatcccaagtacagggatactaagtgcaggtaggttctcttgtctctgttcatattttaatacttaggctccgggaactgcctcctacagccttctcataaactaaacttttcctctctttgctttctgatcatttttccttctctgatcttataataaaaacatcccttaaattcatgcagcaccacagttctcctgctcccaatatccctgacctgttggcccttttattccagtatttagagggcaaagctgaaagcaagatgttggagtgcagggagaagagatcagagcagcctactcactggcaggctaggctccaggaggaaagtcctcaggacctgggagaggtggaccctcatctccaggcccaggaacaggacaggtgacactcctaaactttctgaggcttgcaactctacagagcaaatttttagtgtaagatttgttgtcctgttttataaaggatggctttatactatatatccttatggcttcacccgtccatctcacacagaaccctactcacacacacatacacacacacacacacacacaccttttagaaaatgaatgaatgtgtcaactcaaaaatcttattttcacattaagagatgaaatatcatttgcttaggcagaatagaggtaagaacaagctacaacaaacatatttgatgttttgaaatgtgtaaaagatgtaagaaattttaaaaccaggctgcagaatttcacattgtttcctgtgatctcctacatcaaacggatgcaaggacagcagccagccctgctcttctgacaggctccgtcctgcgtacacctactcattgggaaggaaagcagatgagtgtctccctccaaactcttacgatgttgtgcactgataagaggtgaaggtataattttgaaaacttttaatcatcaagactcctttgcagaaatatctcttcacctccagattcaccattttttgtttagtatttgataaatattatatgctatgcaagcagatgaggttacggttgtttgaggaaattcagctccgaaaagcataatccctctggaattcaaaaccttcaatttaaactatttttggttttaactattgttgagtctaaagatagttttgagcctgggcagcatagtgaggccccgtttctaccaaatatactaaaaaaaattagctgagcacaggggcatgcagccgtagttctagctacttgggagactgaggcaagaggatcacttgagcccaggagttcgagactacagtgagctatgttcatgccattgcactccagcctgggcaacagagtgagaccctgtctctggaaaaataaaaaaataaaatataattctgaaatatcttcctatagatacacaaaacaatttttttctatttgggagcatttcattcagagcacttctgcccaatattatatggagtcatttttcatgggtgctggaaatacaagactggaccacccttgctgctcagggagtccacgatctaaaataattccaacatccttttggaagtgctgtgatagatctatgcacagaaagctggtattattttcttgccttttcacaaatagaaaatagtggaaacaagggatttttatgttaaaaaatatttaatgaaaaaataatgagaactatctggataggaaaaaaaatttttttaattcatggattgaattgtgttcatttttttcctcttacttcccaagtgatacgggaaatgttattcccagtctctctcttgctgagaggctctcctctggtcacaggtgctatccatgcttgatgggtttctcagatggtattttgaaaaatggtttgcttctgtgttcaaatgttttgcaaaagaagaagaaaaacagtaacaggagggagaagaggaggaacagagaaagataaaaggataccattttaagataaatacttactttccatgaaattgatttataaaacaatgtcacctcatcaaacacacatgagataggggaaagacctttttcatcatacagtaaatgttagcaatagggacttttgacaacataataatgatagccttatgagctgtcacatagctagttccatggtgaagtgttcatggtaatgaccaattgagttattttgcgattttgtgtctaatgcaaaatgacaccatgaaaagcattgcaattgatatgaatcgccattgtctgtgagcaaactcaagtgtgaatctactgtgtcactttttctgtctctatctagagagactctaacaggagatacatttgtatttttgttacatgtgaacatattttattctcaatttatgtatgaatccctggcaatatgattgataagaaaccacactgacttaaaataaactgatgtatcagtagatattgccaaaacgttttataaaaatttagttatctcccaattttgtaattggtacatgaagctgatttgttatgagaattcctatcaaaaatattatcctagcataaattatcttagcataatagatacactggattcaaccatgtctttattatggaaaaataaaatagaaactaatattaaagtatgtaccaaaacataatgcatttagagtttttttttaaaaagcaagaatatatttttcttgcatacaggctagtgttaggaggtggaaatttaaagggcttccatttattttgtcttgcatagcatcaaagatagataagtaagtttgaacatgcaaacgtgaagttacctcttactttgaccttcctcaaacataggtatacaacatctgtcatctaatgttacctatttctttattgatacgatgtcactgggctttttgtttgtgtctttgtgatgggattgagatagaagggaagtaccctacacaggacctccgttcactacggaagggaaagacacatgaattgaaactgatgttcacagataggacaatgctgctgtcatctttgcattacattttctattatccttggtctgactgtttactagaaacaccagctttctctagcctcaagacagtgagaatgtcttctgtcatgtacttctcgaagctgttgcagtgccctgtagggcattctagctgttgtcctaaattgagatgacagtgttgctcatattaaattgccttcttgcttggcttggcatgctgggatccatatctattaatgcaggagtgtccaaatgtcccgccaggaaagcaatttgttcctcagtagggagtcagagaagcagctggtctaagaaaccatcagaggtgatgttggggggcaagttgtgtttttcttgatttaatggaaaattctactgatccatcgcctcgcttgtcctcaccacttgtcagcaaggcagcacatatccatcttcagccctctcctctacctccctcgcctgtcatcggtctcttgtggggagtcagcccttcacacagcccaagctttggaataggcattctgacaacaacaaacactttattaatggatttttttaacgtgctggggaggtagcacaatttggcagcattcggttaaatatcacgttgaaaaccaactcggctttttaagaaacacctctcccaggagaacattatatacacacacaccgcatcaatattcgccgtccacatccgttctgccacccctcccagccccaacagagctttctctggaatgaaactaacaaaattcaagatcctcagtttgcatctctgttctgatggattacatgtctgataatcaaccagaatgtcaagtcaagaacaatgattgagtatcaagtgcatgttcactgggcatcaagtgcatattcattgcatgcaagggaggcttgtctggaagaggcctaatgagcaagaaatgttcacctcagctctcacgggaaagctgtttatggccccagtaatcaaactgagaggccagataatccaaagatgaaaatggacctcccaaatgggtcaagctgaagaccagccagccactccctgaccttcagagcttgccacgttagtaatgtgtataataaagtgttgctatcttaacatcatgggactattcaggatactttaaaatgtagcagtgaagcttatatgaagtgcacagtcagtggttatctttcatttctttgagggcagagtttattcaggtttttgctcaaatatgaaaatgacatgtttaatacttaagaagaaagcaagcttccccagggcaaccactgtatctttaatgcactcttctgtgcagttgagtttctgcataatttccatggaactttaacacaatgggatttctatcctaattttatgctttgctttcggtaatttgtcagacctgcaacaatggatgagcaacaaattcttggaaatgaaaaatatgtaattccatatagtgcaaaatgaatatatgtaggcaaatgggtaatacgttgctcatatatggtcactgtttgtcactctcttattcttcattttcttgagaactagaagtctcctgcttcatcaacccaacctaagactcacctccaactctgacactgtctaataattgtcaatctttgtagctctcttatgactttgagatcctgctgaggacaaactcatttaagacccgggattaataagaaatccctcttcacatacgggagaagaggccagtaaacatgagtttattcgtaataatgaccaatgatcttgttatatgtttaattaagctctgtagctttgtgtctaactgaaccctgatttcaagaagcatttatgggtattgaccctatgtcagatactaggtaagcatctgtgatacaaagatgactatgcggagtttcttgtgtctttatgtaaaatgtcttcactacattttgatttggaagaacagctttctcatcataagtcaagcctactcatcagcattggatttctcttttatcataataaaggtattttgaagattcatctgtagattcatgagcctactttcaaatatgttattcaagtcaccaattaaataagacccaggactcaaactttagggaatctttagctgtatcctctttgttgatatttagctattaactactaacctttggatatggtcagatttttttttcctcctcctagaatatttcaaaataaagaattaactattggctgagcacaggggttcactcctgtaatcccagcactttgaaaggccgaggtgggtggatcacctgaggtcaagagtttgagatgagcctggccaacatggtgaaaccccatctctactaaaaatacaaaaaaaattagccgggcctggtgatggccacctgtaatcccagctacttaggagactgaggcaggagaattacttgaactcaggaggcagaggttgcagtgagctgagatcacgccattgtactccagcctggacgacagagcaagactctttctcaaaaaaaaaaaaaaaatgcatagagagatttgagcatagagagaagccaagaaagtgaagaaagctcaggagagtttcaacccatcatgtacccatcatttgtcatcgaagactcataagcatggccttccatcaactgtgcacctgcctacagcaagaacaggcaaaccacagacaatctctactggtgaggctgtttcttggaaacacaagtttcctcaagctattcctcctccccaccctcaattaatacacttcctccctttagaaagaaattagatcagcttaggtgatttttctctttcaccttctaattgttaccaaaccctgcttctttgaggtggtttcagactgaatgacaatgtgttcttcttctggtcctgggtgtgggcaggagaataagatggaggaatgcgctgaaggccaccactctatttcctctagattctctaaggtactctaagaattgcatcgtcaatgaagatgatggctaaatgtaaaaatgatcttaccttgcacataaatggaaattattctagtacaccataaggactaaccttatgtaaaattgtaaagaaatacgtaacagataagctcatatctttttgcttgtttatatctcttccctttcatggtacccttgtaagttctccatcacacctgcctattcctgatctccagcccacattctccttgggctcagcccatccagatctgatcatgctgaatccacctgtctttcactatatccctcccctctgagctctccacgctttggagggagatatgttactaccctgatactaatcaaattgctagaccagtaaaagtctggaggataagcttagtgcccatcctgcagagtaattggcgtctgcattttaatggaggctcctgtctcctcattcagagcaatcctgctggtattttcgactagatgaggaagggaaatgggccctttatgcaggcctgccagaggtatttaaaggtgagcaggattcagaggggaaccttgaacagcaccatccacacaaacctcctctctcctccctacttccccagcttggaaaggcagaccccctccctacttggtattaaacattccacttttttcactaacagtgcaatctccctcaattagcctatactcccaaagcaaagacttggcaagagggcttattgtctctgggtgttacaagtacattgcgctataaatgtctatgctctctgtctgaagtctcgaggagtttatcatttacttgcatctggacacgagtgcagttttcccagagttccatgctcaggcatttctgtggacagagggagattctcttgtgctcagccttcctctccctgacattggtgtggagggctgctctctgagtgagagctgctttctatttgactcaattcagtcagtgttcaccaggtgactcttctgtgcaaggcagctgccaggggctgctagaggtggatgggatgcatagccaagtatcaaggcacaccgccggccctctgcagcaggcaggaggatgtgtggaaacttgcaatgggcccctggacaggagccgtggttcacctcactagggggctgggtgagcggaggctgggcttgtgctgctagggggaggccgtggcattaacattgaaccaataatgctctttgccagaaggtggtggaacccagcaagggcagatgtgagcctcggttcagctctcacccagagccctgggattgcacagccaggggcagcgcccagtgccacagcagcctgcacttgaccttgctgcccaggctgctgcccagcctcccaagtagctgggactacaggcgcccaccaccacgcctggctactggctgtttctgggcccttctgctgctttccctgcacaggacattctgtttgctcagtggcagtgggcagctttgtgaagtcctctcatcttctggaaagcagggctgagctgtcctgagagaatttcagcgccagcagatatgcagggtgggggcagtccccctctcatgcacctatgttgccacctccccggccccatggtgtggagtcactgtccagctgccagtgagggaggcagtgagtgcccccggccccatccccaggccagtggccttcatctaaggtatctggagagctagactcgcacatgccctcatagaagccaaatctccctccagcttgaagccactgtgcagccaacttctgccagtctccccgaggaaataatagtcctcttgatttcatgtgtgctttactttttattttgaaatagttatggatacacaggaagttgtaaacatagcacagaaaggtcccaggtacccttcaccagctttttccaaatggctacctcttgcatagctagagtacagtaccaaaaccaggaaattgactttgctacagtgtatgcgtatagctctacttatcacaggtaggtttgtgcaactaccacctcaactcttttttttttttttttttttttttttgagatagagtctcactctgtcacccaggctggagtgcagtgacgcgatctcggctcactgcaagctccgccttccaggttcacaccattctcctgcctcagcctcctgagtagctgggactacaggcgaccgccaccatgcccggctaattttttgtatttttagtagagacagggtttcaccgtgttagccaggatggtcttgatctcctgaccttgtgatctgcctgctttggcctcccaaagtgctgggattacaggtgtgagccaccacgcccggcctagcacctcaactcttgatttcatcttataactgtgtggctgggtccttacccaagcagaaccccatgaaaccaacagattcagtggttttgatgtacgttttggtgcgctgtgatgtcaccatataagtagccaaatttggtgattctaggttgacttactgctcccagatccataaagattggtcaacacgaatgaacctaaaaagataggtcagtcacacggaaccctgccccagccaaacaaactcacacttgtcaatcatgaactcgtgattgaaaatgtgcttcccagataaaagaagtcatctactcattttgcttccatgttgctgatagaattactttttctgttctggctttcccaaggcaattacaaaacctgtttactccatcgtaagttgaaatcaacactattactataaactctataatactatatttttaccctaactggaagaaattaatcattaaacctgtggattaaatacaacttttaacatgatgcatacaatgagaaacaacttactgaaagcatcaattcaataaatgcatccactgaaatggtggcttatttaagagtcatgttcctgtacttttcttttttctttctttttttttttttttttttttgagattgagtcttgctctgtcacccaggctggagtgcagtggtgcgatcttggctcactgcaacccgcactgcccaggtttcagcaattctcctgcctcagcctcctgaatagctaggattataagcatgcgacaccatgcctggctagtttttgttttttagtggagatggagttttaccacgttggccaggctggtctcgaactcctaatctcaggtgatccaccagtctcggcctcccaaagtgttgagattgcaggcgtgagccaccatacctagcccacttttcttctttttcttcttcttcttcttctttcttctttcttcttcttcttttttttttttttttttttttttttagaaggagcctcactctgccacccaggctggagtgcacagtggtgcaatcttggctcactgcaacctctgtctcctgggttcaatcaattctcctaccttagcctcccgagtagctggaattacaggcacccgccatcacacccagctaatttttgcggattgtttttgtttttgttttttaagtagagatggggtttcaccatgtcggacaggctggtctcaaactcctggcctcaggtgacccacccacctcagcctcccaaagtgctgggattacaggcgtgagccactgcgcctggcccacttttcttcttaaagtaacactttggaaacactaggaatgaactggctctgttttaaggttatatagaaaaaagtaatggagttgggcattgtattagcagtaccataatgaagcttcttaaaagccagcttgatggttatttttaataattataggcactacttacaggtcactgagataaatcacataatgttgaactttgcagtcttataaggaaaaaaaattttctcctttgccagaaattatcaggttattaatttttttcagtgcatgtgtgaaaagccattagcttctcttttttttcttttctttaaatatccagctatactaggtgactgtgctcaaatggtggtgattgccatggactaaaatcccataagaagaaccttgagacctgtcgaggtgaaagctaacccactggaaagtggatgccatcagatttgtagtagttgataagtgtgtagaagtcaagaagcactgaaaatggcagtgtactcaattttaactttatttattcaatgcttaaatcagtcctaaggaggatttgctgtagttatcatagtagcataacgatatactgtttcaaatgaaacacatgtgaagtaacacaattgactcctcattttaaatgatcctgctttaaatgttgagatccagcttctcatagcctaagcatcccacaaccaaatgcctgaaaattaagattcatctctaaaggcagtgtagtcatataagaataagctccacaaaattacatttactatgagtacaatattacaaaaatatatgtacatggataaaaactcacaagaaatccagaatccagaaaacttaaccaggttaatacggtgttattattggtcacttttgctgttttcattttaaattatctaacgctgttctgtgttttcagataacaggaagggggaaaacagttggatgctgatttctcgttggtactatgcatataatagatgttcagtagatgcagttggaggaaggtgtaacaataaaagcaggacatgtcagtagtgtgaatgtgccctttcatggcacaatttagaaaacagcctggaagacactgcacgttggcctcatgctttttaaaggaaataagacatgtatagagtcgcttttatgcatcttgtgatgaagatattccccctggcccatctttaactaacaattgggcctctcaactgccacctcaaagttcagtgctgcttgagaccaggggacacccttggcttcaggggagaggaacccagaggactccgtagtaggcaccatgacggcagcactaaggagcttgccgctctggacttcctagtgcagttttcaaggggtgggttcctggcctccccgcagtcctcctggaaccagagcccttctggtctcctggttcccacagcaacaaagttttctttcagcccctagtcactgggtcccctttccctggacctagtctctttacaatgaggtcccagataccagcctctaatcatcaggacaaacggctatcccccaactccagtttcctccccacccatcacctccctcctaagccagcgtgagtcacagacgcagatccttaaccctctcttgctttttgtcaccttgtccctcgcgttcagatctgttcaagctcatcctcaaaatagctggccttggttttattctgttttaaaaccttgccttcttcaccctttttccccataacccctatcactcctcaaaataaaactttacccccaaaaaactgttcagagtcccagtcccagccttatatggtctgaccctgtcctgcagctcagacccggtttgtttctcaagatcatgaccacattcaccatccaactcctgtctgtgcaacctgcctaaagagtccttgcccagttggataaataaatatctttcatttgcagaaatcttgagaaagcaaggactctggggttttgttttgtttttttccactctctctactcctttttctttggttctctcattcattcagtcatttgttctttaaatctattgtttatttacagttcctgagatcctagttgcaccaggaaatatactagataataaggttacaaagaaatacatttctgctttgagaagatcgtaattcctggggtcctaaaatacagctgttacagttacacaaccaccaacttttcatagaccttaatgattcccaaaatgctggcacgttggttgtctcaattagtcctctctacaaccctgtcaggaaggtattctatttgtcaccattttatagaggagggaacaaaaggtcaggaaagttaaataatttccccaagatagcccagctttcagtgatggatctgggagataagcccacctcccatgctcgttgtaaagtagtgctttccccgccttctcatgagatgtcttacaggggaaagtcattcttaagttaaaaacaacagcagcagcaaggcccgtacagcatgctcaggtagaaaatcacctcctagaaggagtccaacttcgggttccttcatgtagtggctcagtttgtttacctccttgcccacatttaccttcaaaaatttatcttgtaaacaaatgaaaaaaagcagaaagggctctttcaaaaaaaaaaaaaaatgtgctgtaatcccagcactctgggagactgaggcgggcagatcacgaacgaggtcaggagatcgagaccatcctggctaacatggtgaaatcccgtctctactaaaaataaaaaaaattagccaagcgtggtggcatgcacctgtagtcccagctacccgggaggctgaggcaggagaatcacttgaacccggggggcggaggttgcagtgtgctgagatcgcaccactgcactccagcctgggtgacagagcgagaccccatctcaaaaaacaaagcaagcaaacaaacaaaacatgtatctttaagctcaaatgggaatatcccgtcacagtttgagaatgtaatagcttaagaggcagccaaatttttatttctagaaaccagtctatcattttcatgagtcgccaaataggaaactcctaaacatctgctttcctaagtgagtggaacttgtcctggtcctgacctgagaaatcgaaaccgtggcaagagtggttctgtggaggccagatgggcatttctctgagaggcaagaggaaggcaggttaatgtatgactcccaaagttcttacacctagcagtattgatgaaaccatattgttatggaatatcatcagcacggatattgtttcttaagcctacagctattcaaagagaaaggggaaaaagctgtgccaccttaatttaattggaagtaattatgctaacttccagcccccatagctgtgtgcaccagggaggccaggaggacggcaagtaagagtcaggggcacttgcctctccgcgtttgctctacatagtcacacgtgattgttttctcctcgtgtagaacaatcatctcacaacattaaaaggtagaaagagcttcctcttggttgtgtggttattttgggtgcagagttaatgacaaaccttgtataccaattcaccaggaatttcagtccaagccaggtgtgttcaatatggtgacctgaaaggaagcccgctctgttgaccgtgagaaatgagcagttgttagcacgtcaaaggtgtcatccctaccaacgaggtgtcccttcttgtggtttgttcaatacttctccgcatgaatttacttacaatagcaatacacttcatcagattcatttctatcatattgtttccctataattttattatattgtcttatgcaccagagcctccctttttggccaagtgtgtttccacttccatttgattttcaggggggggtcatttccttagagttgttttaaaccatttttctgagcttgggatgtgctgttttatcatatttgcagcagtcagaggctttagagcattttttactaataaaaatgaaaccacctctgttactgttttagtaatactgttctttgtagacctctttccattttcagacttacattgaatagattaggtacacttgtgttcttattcccatcaagctactgtataatttttgtcactttggctcttggcaggagattctgcatacagtgacaacaatgtaggtgtgtgtgcacatgtgtgtctgtgttagggggaaacgtgggcctgagccttggctgaaccctcacagcaagtctagccttcccgcggatcgtaatgaatggaactgcgggagctgtctccgctaaagtgagatattcttctcccagactaatgttttctgcaccagttagcagatttttttttttttcctaagatcaacccatctgccactttcattctgcagtaacctggcaacttgcagtctggatcgttctttttcatcttgacccctggccttggaatgctgcaatttagtgatactcctttaaaggattgtctggtcacttaggcaggtcagtgctgttatttgctcatgtcatgagggctgggtgttcttgaatagatggtgacagtatgaccataattcctaacgtgtccagtcaattgtcatgggctaaaacctttcacagaaataacggtgtcagatatggctgtggagtccatgaaagatgcattattattttgctcatccttcataatacttattttctttatccttattgccaattccccaggagtctagaaatgaagggatttgtttccagttgacatcacagtcttaggcctcgtgcggtttatattctattggaagggaaaactgataaataccaagcatcattttgttgcaaaagtttaaatcatctgaactatatatgtagcagcaatctagattgtgtttattttcctctattttttaaacttacatcatatttccaatctgacaaattgaactgctcctgcagtgccgtgatttaagcctcataggccaatctcttcaggtgattgttttgtctatttttaaaaatctccacaaagaacatttatttttcttcctagtaaacgatgtcattgtttacctgttagaaatgtcttatcaaattttaagataacctgtcctttgttatagtttgagtccattaccctaagagattacttcattttctatagcaaacaaaagatcagtggcctctttaaaaatagcatcttccatattggaagaagaaaatcatgtctggactggcttcttttgatataacaaaaactatttcccttatccacgctcaatacggtcaacaccctctcctgcaaaaatggccacaggggaaaggagggccattttcagcccacttccaatggagaccaatctctttccaacatatttcattcaaatgataaaggattatatcctctatcatttgcttttacaaatagaacattggaagtcttgacttgctattattttcttgaaggttagcaaaaacataacttctgctggagtaacattgactctcttgggtctcttaatacccagactggttacttatgcaaatagctttgctgtgtaattagggtaaagcattttggttaaattgcctttctatacccagaactctatcctagaccaacctttgtaagggaattgaacctgctgggtttgaaaattagaatactaagcacaagtgggtgcatttcttcaatgggcttcgcgttggtctcagattaactggaaacaacaacttgatgtggggatctcagggacagtcacacttcacgatgcctcactggcgacctcagggacagtcacacttcacgatgcctcactggcgacctcagggacagtcacacttcacgatgcctcactggcgatctcagggacaatcacgcttcatgataccgcacatcctgtgatggttgagttattacaaagcatcaagaaggttcatctccacaaatttgtgtcatttttagtagccactgcatctggaatttcatcattagagagtaaagagcctaggttcctgccctttaaaatctcctcttaaaacacaattttataaaagtgttcatgtgtaaagaacatgcctctcaacgatgcatatgtcttcagaaatttcttatagaaatcataaggacggtagaggattagcctcctggcaagggcatgaatgcaggagcccatgggcaaaaccttgcttgcacctttttgagcccacacagggttgagctgcacaatggattaattaagccattttatatttaaatttaaaatatcgatttgtggcttaacttttttttttttttttttttttttgagatggagtctcactctgtcacccaggctggagtacagtggcacaatctcggctcactgcaacctctgcctcctgggttcaagcaattctcctgcttcagcctcctgagtagctgggattacaggcgcgcaccaccacacacagctaatttttgtatttttagtaaagacggggtttcaccatgttggtcaggctggtctcgaactcctaaacttgtgatccaccctcctcggcctctcaccaagtgttgagattacaggtgtaagccaccgtgcccagcctttttttctttttttccccccaaaggaagctcctggtgcactagatgggcattctcatgtgaagaaaaaaatcagcttaacatgaaaggccatcccctcctttaaacagcacaggtgcttccaatctgccaccatgcccacctggctgccccctattctccaggctcctccctggctctaaaagccttgagtttcttacctctctttttcgaggctttgccattctttttgatctcagaatggatcattttctctctgcgaggatgaataaacagctaacactaggactaagtgctttttctcaagcactgctgagaaagatctggaaggtagtgttgcccaagaacaggaggtgaaaaagttttctggtgctcttctaatttaaaaaaaaaaaaaagaaaagtctttagataccaaaatgtttctgtgatgttgtcatagaatcataacacccggccagacatggtggctcacgcctgtaatcccagcactttgggaggccaagactggcggatcacctgaggtcaggagttcgagactagcctgaccaacatggagaaaccctgtctctactaaaaatacaaaattagctgggcatggtggcgcatgcctgtaatcccagctacttgggaggctgaggcgggagaatcacttgaacctgggaggcagaggttgtggtgagccaagagcgcaccattgcactccagtctcggcaacaagagtgaaactccatctccaaaaaaaaaaaaaggaattataacactcaagaactgtgaaactttcctattcttagctctggtccgttttgcattaccatggtgtttaattgagggggaaaaaaagtaggctacagataaattggaaatgattcaactgagagtgacaaaaattattaaaatgattaaagggttgcaaaactgatctgtgaggatcggcttgaggaattggatttatgaagtctgaggaaaagggagctcagggcggatttattaagtgtattaagggacatgatacggaggaagctgaccaatgttttcctgctctgctgaggacagagcaaatggaaatgatcttacaatatggcaggggagaatttttcatcatgtgtaatggagccataaggactgaccctcaggaaaagcgtttccgaggttaaagaaaaagaaaatacttaaaaatattctccttgagacaggtttttaaaggatagacagtcgacaaggagttttatatcttgttctgcctaaaggcagggtttgtgccaggtgacctttgggggcattttccattcctttgagtctacagatttatagaaggtcttgaatctgattttagtgaattcaaaagcaagtacacatcagctcctaaccatcagaaactaaagtacaaggacacacacatttttttgctattgaattaacacctggaatctcagctattcatgcaatcatttcttttgtagtctgtgattgcaaactaacagttattagtcctctgtggcacttaaaaaagggtacagcttttatgcctaacgtgtgcgatacttctattagcaacgtgtttccctggatacgttttatcagaaacttcactaccaaaaataagaatatagaaaggcattcccatgtgtcagaaaaggtaggtcatttatttcatctactattatgtattgagcacctattataaacctggacctatgttttgcactgagcatacaaagatggaaaagtaagtcaacgagcttacttgggtggtcagggagtgattcaggctggacgtgaaaacccgttatgaaaatatagtttactgaatgtttaaggaggttttagtgagggtaggaaaatatgaaataccacctaaaatgggattaaattgacagaaaatatcaactgtgcatggtaccatcaggagcagagagaagagtcaagatatagaggaggcagagaatggagggtagggggaagggctcaaaggaagagagcatcccttcctgaacagctgcgtgctgggccgagaggaaagcttggctgtccccagcagctgtctggaacttccctgaccagtggaatgctagttagcaaaagagattgtagattataattggcggttccccaccccatagccaccttcgagggttaaattgggccatgtacaggcagaccagtacataatgtgatttaataatctgcccaagtcattgtgtcaaaactgagaactgatgccccaaattcacttgataggaaatggatcattccatttcatagagatgagcaatgttacaaatgccacactgaaaagatacttagacaaaaagtcactcgtcttcttagccccacagaatcttaggctgaaaaggaacttaaagcctagtcaccaaacctctttcccactactggaatgggttccgcacaccttccttccttggcaggtgtccaacttaagtggcaaaaagttcagatctttcaggaaggttgtttaggaagagaggaatttttaaaaagttcttccttacgtgaggcttaaaactgcctccctgaaacatgcactcatggcttgagacccactcctgggagctgcttagtgtagctgaacaggcggcctgtgacatcctcttgtgggtctcttctctggaggcttaatgcccctcctcagcctcctgtgaggctgctcctggctccgtggcagccttgcccaaatgggttacagtttgttaatgtctcacagaaggtggttccccaaattgactttttggtactgcagaccaatggcctagtttacaactgagcaagctttttgggacagccatatcacacttatctgtaaagaattaaatgtataataaatcaatattactcttttaccgttagcattattgagcactggctgtgtgcctctcaataagcccagttaggtccccacagccacctgccactcctgggccccacccacctgcatcatcctcctttctgcacttgtctcactcgcctgtgaccctttttgaccagcccagagcagtcattcaatcagcatttgttgatgaattcattaaataggcaacaaatttttcagcctctattgagtttgcaggtaacgtaaatgaaagttgggaagtcaaattgtcactgtttgcagatgacatgattgtatatctagaaaaccccattgtctcagcccaaaatctccttaagctgataagcaacttcagcaaagtctcaggatacaaaatcaatgtacaaaaatcacaagcattcttatacaccaatagcagacaaacagagagccaaatcatgagtgaactcccattcacaattgcttcaaagagaataaaatacctaggaatccaccttacaagggatgtgaaggacctcttcaaggagaactacaaaccactgctcaatgaaattaaagaggatacaaacaaatggaagaacattccatgctcgtgggtaggaagaatcaatatcgtgaaaatggccatactgcccaaggtaatttatagattcaatgccatccccatcaagctaccaatgactttcttcacagaattggaaaaaactactttaaagttcatatggaaccaaaaaagaacccgcatcgccaagtcaatcctaagccaaaagaacaaagctggaggcatcacgctgcctgacttcaaactatactacaaggctacagtaaccaaaacagcatggtactggtaccaaaacagagatatagatcaatggaacagaacagagccctcagaaataatgccacatatctacaactatctgatctttgacaaacctgagaaaaacaagcaatggggaaaggattccctatttaataaatggtgctgggaaaacagtctagccatatgtagaaagctgaaactggatcccttccttacaccttatacaaaaatcaattcaagatggattaaagacttaaacgttagacctaaaaccataaaaaccctagaagaaaacctaagcattaccattcaggacataggcacgggcaaggacttcatgtctaaaacaccaatagcaatggcaacaaaagccaaaattgacaaatgggatctcattaaactaaacagcttctgcacagcaaaagaaactaccatcagagtgaacaggcagcccacaaaatgggagaatatttttgcaacctactcatctgacaaagggctaatatccagaatctacaatgaactcaaacaaatttacaagaaaaaaacaaacaaccccatcaaagagtgggcaaaggacatgaacagacacttctcaaaagaagacatttatgcagccaaaaaacacatgaaaaaatgctcaccatcactggccatcagagaaatgcaaatcaaaaccacaatgagatatcatctcacaccagttagaatggcgatcattaaaaagtcaggaaacaacagatgcttgagaggatgtggagaaataggaacacttttacactgttggtgggactgtaaactagttcgaccattgtggaagtcagtgtggcgattcctcagggatctagaactagaaataccatttgacccagccatcccattactggatatacacccaaaggactataaatcatgctgctataaagacacatgcacacgtatgtttattgcagcactattcacaatagcaaagacttggaaccaacccaaatgtccaacaatgatagactggattaagaaaatgtggcacatatacaccatggaatactatgcagccataaaaaatgatgagttcatttcctttgtagggacatggatgaaattggaaatcatcattctcagtaaactatcgcaagaacaaaaaaccaaacaccgcatattctcactcataggtgggaattgaacaatgggaacacatggacacaggagggggaacatcacactctggggactgttgtggggtggggggaggggggagggatagcattgggagatatacctaatgctagatgacaagttggtgggtgcagcgcaccagcatgtcacatgtatacatatgtaactaacctgcacattgtgcacatgtaccctaaaacttaaagtataataataaaaaagaaagtttcacagtgtttggtctgttcccatttatccctgcaacaactcctgacttgtaacatgactcagtcagtacaggtctggggaacacagggttcacccccttttcccatccccgcacacctgaggtttccgacccgccctgcctgaaaccctgctcggacgctcagggttgggaaaaggctatgcctggcagggagtggtccccatggcaatccctgccggctcttcctcagggagtcagaccttgcccagctctgaggtgcagataacgctgtgttcatgcctttaagtcaccctcattagatttcttgtggttcggttcagcccatccttccagccttggagaccctttgggatctttcttcaagcctctaagttattgaatatcttatggctttttgacctctaactataagaagtcacatcttctgtctctatacccatgtcatcggtatagctttttaaatatattaatacctttcctcatgtaacaaggacagacctaacactatcataataaactagaagtcaaggctgaaaatccagatcatggatatagcaaagaattaggttgaccacagaggttcttcaatgctttccccctgtctagggtgtctcaatgatcaaggctgaaggggactctggtggtgatataatcatcattatcagaatagaagcctgtggattcctgggggaagcaggcttttcctcacagtggattctaaaagaatgctcacatctgactttgtgtcacggccaccctgtggtgcagtgagtgatgtttacaacctcttttttaaaacagcaactgcaggccggactgcttctggttgtgaccttcatagaagcatagaggctctcgaagcagggctctgggggcagagcaactgccttagaacccagctagactaggtcgcccccatagccccctcagtccagtccctcacctccataaacctctgttaaatgagggtaattaataagtatctacctcctggggccgttgcagccattaagtgagttaaaacatgtaaaagtcttagtgcagtgggggcaaaggttatttagtggcagaggttatttaggatgaaaatggtacttatcccatatatttgtggtgagaatgacctgaataacccacagaaagagcacagtgtgcagcaaacagaagttcatgagtcttggctattgtataaaagacttttttatgacttgttcagacaagattaaaatcttcagaatgacagccataaattcatcaagactctacggtacagcagcagccccctcccgttctaccctccttttagtcaatctagtattacaagtagcacccaggccttccagatcccatctcctccctctacatgggagatcagtttgcctttataatacacacctgctgttagccttgggccagaagacataccctgaaagtcactagaaccattcgttcatcaaccataaaatagtaagatttccaacatattaagaagtttctatcagacatggtgcttaacattggatatgtatcatctaactcaatccttgccacaaatgcatgaagtaagtgctgttctcctcctacaattaaaatgaagaaagtgaaggttaaagcaattaagcgacatccccagggttacgcacctactaagctgtggagtcaggtttttaatccagagccttctactccagagcatgtacttataaccattccacacctgtccttcccacacattcaccgtagagcatggatcagagccacctcataccctcaccgacactgctccaccatcattagtcctagccgataacactgtgttctaactattatctttccataaatgcactggtactccagaggttgctactcccaaatcccccatttctctcttccctgcttgttactggtcccctccttcaggatactcttactatcctcatccctaccagtcaatgcacataaatgacagctcacattatcccattttttaaatgtgggaatggattccagagtcgggatgttgcttcagaagagaaggggtgggaaggcaagtagcttggggtgctgggaaaccttgctaatttcccagggttggttagaaggggtcctttaccatcagtcatgtttacttctagaagctctccttttgatgtcattggttttctgcacagccaaacattgttcatgagcttagagaaaatattgttattggcttggttgacagcgtcttaatctctttatgtctcagcgtcctcagctataacatagggataggagtagtgcctctcccaaagagtgcaaacttaatcaattgactaatgataagcatgtgcagtgcatggcccaaaatggacatgattagcaacaatgatgatcaggataatgcatttcagagttgcttcatgtgatccacaaaaagcagtttttaacacaactcataaaaaagcttttatgcccagatgattcagtgatccaggtattccttctcacatggctgataactaagacatgcagactttctctctcatgtcactcactgacagcgcatcttagaaacgtagtgttatatcttcccccagaacagccgcatcttagaaacgtagggttatatcttcatatcttggtgttacatcctcagcctcaggatgctgctgtggctgaggctgtgctgcctgaaggaaacccctgtctgtccaaggcctgtctgtttggtttatagacccacacaacccatggctcaagaagccactgagccttgtacaaattcacaatgtgagatgctatagagaacaaatgaccagtttctccagcatctgagaggcgtggagtacaaagcagaagagagacagttgcagatggcagacaagtcaaacaaccacttgaacatctgggctgggtgtgaagcctgatttctgattcctggaaacagaccaaccattaaaaaaaaagcattcaacagtctgggagaaaatattgcaaaagacctatcggataaagggactattaccaaaatatacaaagaacttttcaaaattgacagtaagaaaactatcaacaagattaaaaatgggcaaaagagctgaacagaaacctcaccgaaaaaagatatacagatgcaaaaaagcatatgaaaagatgttcaacatcatatgtcatttggcatttgcaaattaaaacaatgagatacctctacacacctactaaaatggccaaaacccaaaacatggatgccaccagatgctggggaggatgtggagctccaggaactctcattcactgttggtgggaatgcaaaatggtacagtctctttggaagacagtctggcagtttcttagaaaactaaacacagccgggcacaatggctcttgcctgtaatcccagcgcttgggaggttgaggcaggcagatcacgaggtcaggagttcgagactagcctggcaatatggtgaaaccccgtctctactaaaaatacaaaaattagccaggcatggtggcgagtaccagtagtcccagctacttgggagtctgaggcaggagaatcgcttgaacccaggaggcggaggttgcagtgagccaagattgcgccattgcactccagcccgggcgacagagggagacttggtctcaaaaaaaaaaaaaaaaagaaaaaaaaaaactaaactaaacatacgcttaccatatgatctagcaaacatgcttcttggtatttacttgaattagttgaaaacttatgtatacaactaaaccttcatacagatattgacagcagatttattcataattgacaaatctgggaagcaaccaaggtgtccttcagtcgatgaatggataaataaactggtacttccagacagtgagatattattccatgctaaaaagaaacgtactgtcaagccatgggaagacatagaggaaccttaagtgcatattaccagtgaaagatgccaatctgaaaagactacatactgtgtggtttcagctatatgatattctagaaaaggcaaaactctggacacagtaaaaagatccatgattgtcaggggtttggggaggaaaggatgagtatgtggagcactgagggttttcaggaccatgaaactcttttgtataatactgcagaggtggataaatgttatacatttgtccaaacccataggaagtacagcaccaggagtgaacctcatgtaaactgaggactttgggtgatgatgtgtcaatgtacattttgcatttataacaaatgtaccactcttgtggggaacactgatagtgggggaggctgtgcatgtataggggagaggggagaggggagctctctgtactctgctcaattttgccgtgaaattaaactgtctttaaaaataatctctattgaaaaatgaaaaattctaaaagttttgacacaactgactttagataatagtaaggatgcattgattttcattaacatttcaactgcaccttaaagatgcgtgagattttgtaaggaaacatggccgaaggacttttggcaaagacactgcatgaacaaaagtggggaaggaggagagtgagggcagcattcagaagacaacttggtgttcagtttatctgtaatcttgggaacagctgcggtttcaaataattcattgtattattcctggacaccatttcagaaatcatagcattttggcatccaaattctaccttctgaagggtctttcaaagctagaagagaataaaaattctttacccattcgtagaacttggttctgaatatatgatgacctcagccacagagcagtaattctcaagattaattgtgcctaagaattgtcaagggaaagggttacttatggaaaatgcagaaaccaccaccacctcgaatccagtaggtctgaaatgaaacctgcaatctgcatttttcacgagcaactcagctaacttggatccaggtggaccagggaccacattttcagaagtcaaaccatagaggtagatgcaagaggctagaagagaggtcccacattccaaagccaataagaagcaacaggtgacatgaacgagagaaatgaggggtgggaaacactgatcttagcttttcactttcatacttaggagaattatgcactccacaaagaaatacactctttctcttacttttagaaaaacacagccctttcccacttttgatagagacatgggacagaaatatttccctatatgcaacagacatttatgtgtaatgacaaatagcaactgaagggaaggagtggaggcccagggtgtcctcattcttcactttagcaagggaagtttaggatgcatcttttacgttgatctcccaatctgtaaatgttgtcttagattcttttcaagcactctgtgagccaaaaaaaaaaaaaaaatgtgtgtgtgtgtgtgtccagaccctgctcacaagccaccagttgtgacctttgaacgaaaccctagctgggaaggttggtttggactagatcacagggtttcagcctgagttctgagaaatgtgcggaggttgcaaagcatcgggggcttcagtagaagataaagaagaatctcaatcctcccccatccccatacacacacactcaccccatctcactcttcaacatgaccatctctgcttttattatgtataggtgttccaaagcatatttcacttgaaaaatagaatgtagccgctagaattcccaaagaatatcctggatgtattagtcagcacagactaaagtctgttgcagtaacaaacaacttcaacatttcagtggtttgaaacaacaaaggtttgtttctcacgcgtaaggcctgtccaatagggttggcagggagactgatgtgacctcgttctccatcagggtcggcaggtggagcccttccttcaggaagcaggatggtgggagggatggagagttgagtgccagaaattaaaggctctggcctcaagttacacatgtcattgccacccacatttcattggccaaacaaggcatttgacgacatctaactgggttaggacagcacacccttcccacaagctctcagggagaagggagctgaagaccctgtgagcagtgtgaatggctggcacggcggggtcatgtggtgtgttgggaggaggcttgaattccaaaccagagagtgagcttttatttactgaggaataggaattataatgggatcgttgaggagaggagtaacataacaaatgtaataaatacaaacactaattataaaaagctaaatattccatttattaattaatacactctataacatgatactgatttgcagcctgaataaaaatccccttggtgagcagaggtttctatcagctaaattatgaatagtataggttagaaattgattaacaataatttgtcttttttcccacatgtgaatttaaccaatctaataagagctttataaataactaatgaaaaaagccagtctcagtgcttgtgagtcctcccactgtggaaaattagacccatctattgaagaacaaatatcccctcatggaagcaaaggtttcctctctcccgtcatttgatcagatttagaagcataattaccatcatgcaatttgaactaaatatattaaagtatttctttgaagtgaaaataattggaaagcatcaggaacaagcctttctatttgagacaccttgggaggagagttagcctcaacaaaggctgaagcagctacagctactgatccctgctgccgacttcccacccaccttggcaacagaaccaggcagaatcctggtctcatcttgtttgcatttgatgtgaattctgtcaaaaggaagagataattgagctagagttagccttctgaattgaaagggaaaggagcgagaagagcagctgaaaatactttgtggtgcaaagtattcagtctgtaagtgggatatggtgtgtgtgtgtgtgtgtgtgagagagagagagagagagagagacatgtaagcactgtgcacacacacagacttgagaattgtacccttgactcttttcaatgggaatacagagttttaaaaaggagtaatatctgtctcttatctctcctaatttattcccagttcaagacagaggagcaagaacttttttttctttaaaggataacctttgccagagggtctgttttgaaggaggaatgtctgtgagagctgaatgatgatgtctctctttcttcctgtagtggggacaccctgtcctccactcgcccttacctgggaagttgtcctaaggaggtacaaatcccttccactccttggcagagcttcctgtacttctttacctgacttttcatgttgggagtgaggaagtactgataagtgcccctcctgcaggccactagccagcaatgccgcctggccctggcctgtgggctgacccctgggaacaggctgtggagtcgtagccaggaggaacgggcatgccagcaggtttgtgacgggttttctgccttgatgtatttgctcctagggctgccattataaagtgccacaagccgggtggcgtagaacagcagaaatgtgttgtctcacggttctggaggccagaagtctgaaatcaaggtgcctccaaggtcatgttcctctgaaacccatggggaagaatccctccttgcatcttctggcttctggtgtttgccagcaatccttggcttgtggctgtgtcactccagtctctgctcccatcatctcatggccaccttcttgctgtgtctccctcctcttcttctgaggatgccagccatgtttcagttagagccaacctactttggtatgaccttatgatatggtttggctgtgtccccacccaaatatcccttaaattgtaataatccccacagatcaagggctgggccaggtggagataattgaatcatgggggtggctttccccatactgtccttgtggtagtgaataagtctcacaagatctgatggttttataaaggggaggtcccctgcacatgctctcttgcctgccaccacgtaagacgtgcctttgctcctcattggccttccgccatgattgtgaggcctccccagccatgtggaactgtgagtcagttaaatctctttcctttataaattacccagtgtcgagtatgtctttattagcagcatgagaccagactaatacaccttaccttgactaattacatccacaatgacactatttccaaagaagatctcattccaaggtactgggtgttaggacatcagcatatctttgtaagggatacaactcaacccatgacactcaggccactcgatcctcccagctagccttgcctgtgtgcactgtcattctgatgctctctaacaggaaccaggaaaatctaaagagattctgtattcccatcaaaccgggaagggcaagagcacatcacttacatgttaagcctcttaattacatttattctttgaacaaatgtttggcacttctatgtgctaagcactgtgccaagtgcccagaagatggtcacagcatgcccccatgacacagaggtctagaacgaacaccaacattaaataaccctgtgcacggatgctgagaaaggggaagctcagggtgccatggtagtatggagtgagggctgtaacctagtcttcagaacattagaaaggcctccctgctgaaataaagcttcactgagacctgaaggaagagttgggtctaaccccaccaagagagcacggaattagattctagaaatgatgaaagtaaatgaagatgaccgtgcttgtcatagatgaacaatagttgtgtgaacaaaacaggaacctctttctctcaggacatggtccccatggctggctctgtggtaaggaaacagaagctcccgtctgtggctctgctgtcccttgagcgtgctcaggtggttgaaggtgactggcaccatacctgccttccagcttgcacaaagagagaaggagaagggctgggaacatgccttctttaagggcgtaacccagaaatggcacgcttcactttcgtttacatctcaggtgccagatccagtcacatgggaccctgagtgcaggagaggccagggaatgtagtctgtacctggcagacacgtgcccagtgaaggcttcttatactgcagacgggaggagaagatacacatcgggaggagaagatacacatcaggaggacaactatgagccatagcatgttgtctgacacgttaacaactaaggattccttccctcccctaggatatgccgggcaatgcagtggccactagccagcgtccttggagcactcaaaatgtgggtagtccgaagggaggtgtgttgcaaatgtaaaatacaaaccagatttcaaagacttaataccatagaagaatataagatatcttattagtaatttttatgctgattacaggatgaaataaattttttgatatattgtggtaaataaaatatattatcaaaatcactttcacctgcttctttttgctttcctaaagtggatattaaaatacaatttatatgtgtggctcgcattttatttccaatgtatagcaccactctagaatcgtttaacggtgtagagggcaagaaagatgtcaacaacagagttcaaggcggagcaagggagaggagtcctagaagactggggaaaggctggggatgaatcctagaagaacttgatgttcgcctggagacttggatcttacaagttcactggaagcacagagttcatcagatgcacctcagccagctggagcatgttcctgaaacctctccagcccatttctttgcccgtaagatgggaatacatgtgcttattgcagaccgttttcatactgattaaatcagttaatgtgtgtaaagctctcacacagtatcagcacattaaaatgttcagttttgttactgaatgaaggaaccagtcgatgaagaaactagaaattcagttcaatccagtgcctccttgcacaaacagatttgaaatctttggatagttttgaaggaaaaagcatcattgatcattaaacttcatagaaatagtttcttgaatgcagaatgtaagtaacacaaggtctccactctccttaagattcagtcccttgttccacaggcatgaaaaggaccagtcaggcttctcagctgacgtggacacctgataacatggtgatggagaacatttttgttgaggctttgaagtagtcaagtatattgaccttgacctacctggagagcaggtgttggatagagttggggtaagagttgccaagacatcacaaagtcctgatgatacggtattttcattgcactgagtaacccagtgggcatttgctatttatttatttattttttattttttaaaagctgccaaataattatgaaagtttgaaatgttctattaaatatggtataaaactaagtataggctgtgtctgcaagcacccactaaatcatacagtgctgtcaaaaattatttttcagtttctgtctccatggtaggaagaaagcatttgtttagtttagtgggtggacccgttaacattgctggaaacggctgatcgagcgtccctgccttcccggctcttgtcttgtctgtgcggagatagccctgtgttctgccttctggctgtcacttctttagtcacttacagatggcattttgaaggaatgctaattgaaggacttcactgttcacttctaactaatcattctgacagaaaacatctcctctgcaaaggaagaggaggaacccaagagaagaagcttttgcttctctgtgctaatgcacgtcgttctgtttcaccctaagatgctctatgcggaatcaactcaaagaagagcagtgactgaggtgttgccagcgtccctccctcatcggccctttctgcatctgctcttcgtgtaatctgtgcccttctttgttcattgccacatattcaggcgactctgtgctgcaacccccgttagtccttccgttcgtccatctatccatcagttcatcaactggataaacactgaccgagtaccttccattagcagaggcagtagagtgtgatggtaaagaacacaagctctggaaccagactttctgagttcaaatctcagccctggcacttattagatgtgtgatgttggccaagtcatttaaaccccagtgagtgccagtgtcctcatgggtcaaatggaataatgatagtgtcaaaattattgagcagttttgatggttaagtgaattattaaatataatgggcttaaaatacttctttaaacaagagaacattcaataaagattgtctactttaattattacatgtgtgccagacactttgtgggagatggaaatatgaataggctatgatcctcccctttggcatcttaagtcctcttataatatgaccaagaagacatttcagataggtcaccttgcaataagtacaatttgaagctactttattatttttatctttggtggcatttaactagaatttaacggttatgttttataactatgtatatatgcatgaatacatttttataaaaattaagactatattaaaaatggtctgtacagcctgctatattataaaatcataaaacatgatagggcccttagaggtcagctggtctaacatgacacccagtgtgagaatcttcccacaatcaccagcctctactcagatccactgggaacaccacgttcatcaatgcatgccattttggctgcagagattactactgagttttttcttttgtgaaattatattctttctctcaccagtacccacttctctgtcacagtttcactttccatgctagcaagaagcatgtataatccttgttttagatggcaacttcaaacatttaaaggtccttcacccaccgtattttcaaaacactgacttgccaaggttctttctacctaatataataaggccctcctaatatgtggtgtctagaacaaagtacaaaatttcaactatcttatgattagagatggaatttagcagttctggtcttcagcccaaaacagcattagctgaccatcaactaaaacccccaggaacttttcacgttgactgcttccaagctgggtctcctcccaggagttcttaatgcacctcatttttgaacataaaagaaacttttacttttaccccttatcaatttcaactgtcaccataatcttggtcttgtccaagaccataggccataatcttggtcttgtcctaccaggagacccaccccgggcctgtgccatccatctgacaagaatagcttctacatctttaaatcattggcaaagttactgaggagagtagcatcaaggatgaagcaatactcaacctcatcattataataattaacattgatttaggtcttaacaaagtgctttcacttatagagtgatatttaatttggttctcaacaacgagatggatgacagctaacatgtactgagcatttacttgatggcagttcttatatgtcttatgagttttaccttacttaattctcccaacaatcctatgaggaaggtaatgttttgacccttgtttagaaaggataaaaaacaaggttaaagaagttaagtcataggccgggcacggtggctcacgcctgtaatcccagcattttgggaggccgagatgggtggatcacctgaggtcaggagttcgagaccagcctggccaacatggtgaaaccccatctctactaaaaaatacaaaaattagtcgggcatggtggcaggcacctgtaatcccagctactcaggaggctcaggcaggagaattgcttgaacctgggaggcagaggttccagtgagccaagatcgcgccattgcactccagcccgggtgacagagaaagacttcatctcaaaaaaaaaaaaggaagttaagtcactttcccgtacaaagttccaggagcaaatgaaatggctgggatttgaacttctctacatgccactctgaaatgtgtgtctttacctaatatgccagcactgaaaggtgcagagagtggatttgcccaaatcacaagctttgtaagttgtttctccaagattccaactcacattatactcttagactccctctccctttggactaacaagaacaacccaacaaacgatgttcagccaggtgcagtagagcatcctgaaacaaaccccatcaacgccctctcacgctccctgtgtggttcacagagcaatcgagaaagccttggggaaatgaatgagtacgatccttcttccttcaggcatcaccctgcccatcagcccagccacctacccaactgtccatacgaagttttctaagagaaccaaatcatttcaaaagatcttgaagtcatctgatatataactgaaagtgctcgactctaaagaaatctgaacacaggcaatggtatctgtaatagttcatcctcgcactgctataaagaaataccggagactgggtgatttataaagaaaagatgtttaattggctcatggtttcacaggctggataggaagcatgatgctggcacctgcttggcttctggagaggccacaggaaactttcaatcacagcagaaggcaaaaggggagcaggcatctcatatggcgggagcagggggaagagagagagggaggagagataccacacttttaaacaaccagatctcacgataactcactcatgatcacgagaacagcaccgatgggatggtgctcacacaagcatgagaaccccacccccacaatccagtcaacactggggattacaatttgacatgagatttggtggggacacacagccaaaccctctctgtatctatgaaaagtagagagatctggccgtgcacagtggctcacacctgtaatcccagcactttgggatgccaaggtgggaggatcacctgaggtcaggagtttgagaccagcctggccaacatgaagaaaccccatctctactaaaaatacaaaaattagctgagcgtggtggtgcctgcctgtaagctcagctacttgggaggctgagacaggagaatcgcttgaacccaggaggcagatgttgcagtgagctgagattgagatcatgccactgcactccagcctgggcaacagagtgagactctgtctcaaaaaaaaaaaaaaaaggaaagaaagaaagagagagagagagggagagagagagagagagagaaagcaagcaagcaagcaagcaagcaagcaagaaagaaaagtagagagatttacgtagattagagggacagaccaccgccatggcacttttgtgctgggagcgagcatgccaaagatggctctccacacctgggtaagagttcaaagcctttgtgaccagggatactccttggccttatgtttgtcagctcctcttttcttcttcaacttgactagaggaggaaaatgcttacgtcattgtattgtaattgctggtctaggtcctcctggtaagacattaagttggaatatcctaacagctaccttctttatggggcttgatgccactgcaggaacagatgggcaaggagaacccaggagttactgtggaaattggatgcccagcttaaagtaattgggagcagtatggcaggagccatcggaactcaaatgaatccagaagttggtgttagcataatcagcaacaagccaagaactggggagttcctgcagagcctggaggaaagcctttgtataacagcttggtttttaacagcattcctttcccttgaaaacaatgtcatccttcacctaataaatcaggtctcaacaattcaaggaagaaatataccataagtgttgtagtaatgacaatctaggaattcctgcataaataattcatgtattagatccctagtaggttaaaaaaaaaagttccaagtatagcaaaaaaaaattattacatacatcatttttaaatatagaaatttgtttttgttttgggtttgttgttgttgtttttgagatggagttttgctctttcgcccaggctggagtgaagtggcgccatcttggctcactgcaacctctgccctccggagttcaagtgattctcctgcctcgcctcctgagtagctgggactgcaggtgtgtgctaccatgcctggctaatttttgtatttttagtagagacagggtttcaccatgttggccagactggtcttgaactcctgaactcaggtgatccacctacctcggcctcccaaagtgctggggttgcaggcatgagccactgtgcccggccagaaatttgtatttttatgattatattgcccatgtttttttttttccagtatgaatgtaatcacttaactgacaaggcaactaaaatacaaaatgtataaataaaacaatttctattaagaaaaggaaggaagggagggataggaagaaggagagtgaattatgtcttagaaatcagtatgccaaaactggttttgatttttgagactctttttaaaaagtattgtgagaattctgaaaactcttagcccccttttctttcatgtttttcttctagtcgcctcgttcctgagaaatgtcatcacagtaggttatcagccaatggtaaatcgtgacctcttcatctccaagggtctgtgttctattttccattgccttaattcctcttcatcattcaatgtatcagccatccttttcctggttaatgtactgttttctttcatggtcccctagtctcttagtagtcaagattcactgtcaaaaattccttgttatgccaggtgtggtggcttacgcctgtaatcccaacacttcaggaggccaaggtgggaggatcacttgaggccgagttcaagaccagcctgggcaacatagtgagaccccacctctacaaaaaattttaaaaattagccaggtgtggtggtgcatgcctttagtcccacctactcaggaggctgaggcaggaagatcacttgagcccaggaattcatgcagtgagctatgatggcaccaccacacttcagcctacgtggcagaggaagaccctatctctaaaaaaattaattaaaatataataaattcagatgtccttctcggtctctgttatcttctctgctcctctgtgaacattacttaaattccattataatttatactaacagtttaagcagctccactccggagaataaaatttggagttcttctcacactacaaagacctatgtgacctggccttctgtcctcggcccgatcactttccccttgttgacaatgctccagtaccctggcccttcatggtgttctctaaatgaagcagacttgtcctcttcctagggccatgactctcccttcctggaggaccttccttcagctttttgcatggctgcctccattcatttagccctctaaacaggtgtcccctcccaggagaggcctgcttagaccatgccttccccaaccactgcacgatctcaccctgtaagccagccctgctttcttcatcacttaccactaactggaattacattattcaattgccttgcttattttctgcctttcccctctctccaccccatttcatgggagaatctcattggttttagtcatagaagttttgtaggtattcagtaaatatgtgtttaatgacgggagggaagaaaaagaggaaggaaggtagggggaggtgggaagggagggaggcaaggagcagggcaggaaattccattcattcattcactgaacattaatgggaaattcctagtgccagacttcatgctggaggcagggtatgcccaaagcaatgagcatggtgcctctctattcgcgagcctccataggcgctttttctgaatgaatggaaaagaaggcacaacccctacctcctacatgaatacacatattatcatatcagtagtcaatatttaatattattcaactaatttctccttgtagttgtttgcaagtctaaaatagatcttagtttacctaagcgaccatcaaaatgtgaataagatggtctacaaaatggtgaaggcttagaacatgggctaaaatcctttttctggcttttcaagctttacccaaactaacctttccaaacccatctcattaccttcccaacacacactcttagttctagaaaattcctttgccatcccacaggccccagactgtcttccttgccttggctcacacagatgggcgaaggggcagtataggaaggagacagtagtgtgatctgaaccaggcaagtgctgggagtcccagccccttcactgagcagttgttactgagcaagcccacttcatgggtctatgcctcaatgtcttctcctgtaaaaagggttgagggataggacttcactcagaattgcttttggattaaacatgatccatatacagtcctgggcacagtgtttatcaggcaatggttcataagcattagtcattcttacctcatcgcccctcaaccaggacacccatctttccccgtctcactccgtggcacctattcactaaactcacttgcccctaacctccatgaagacgagctacacctcccctaaactcttactcagacactgatgtgcattgttactaatatgagctctccttaattaaactgtgagcttcctgaggggaaaaatcaggtcctgctagcacaaagcaagttcttgaaaaatccttgattaaagagtgtatgatagagctaaaaaattggaatgcacaattcattctgctctggtgctttaaattaatattaaatatgtctgtaacatataaatcctagactttcacatttaatcaaagtcttaatcataatgagcagcatttatgaaagggcaattaacagattcccaaaagaactggaaatagtaaattgctaatagcatccctaaggttttgctttttgctctgataaattaagtaatttaataatagaggcagtgtgaaccaaaaagaacgcaggcttaaaaggcagaggacctgcattctgatccttgctctgccagcctgtgactcagcaccagtgacttatctgctccgagcctctgttaactcacctcttatgtgagaagctgtattcacaccactgcttgtcagaacacgttcctaaaatccttatggttctatgcatgaaatctgacttcaaatttcatttttaaatatatcatagactatttagaaacaaaaacaacatatacatactcttagcagaaactgaaaattcattattttgtgcagccttgagctaaagtttctgtttaataaagtgcattacaaaattgtaaaatgaggtgtttaaaaaaaacacataactgtttgccacacttatctgggtatatcagtgtttgcttgatctaggcaacgtaatgaaatatagaaagaacgaaataatacatgattacatgtgtctttcacaaaactaaatttcaaaagtttgtgttcaccaaaaataagcttaatttattaaaaataaatagtttatctgtttctaaaaaatgggtttctggacaatattttctttgctaaaaagtaaacatctcttctacataatcttaagggaccttagaactttcacagtccataaaattatagtcttaaagcctaatagaatcttacagtttaagataaataaacttatatgtttaaaattctcattagattcatcagtgtttccatctttaactgattttcctatactttaagagctaaaataattccatgaaatttcaatataaagcaatatatatataatatataaagccttatatattattgttctaagtctccagattatcccagttcagtctaaaatattctgtttttctcaggatacctctctctacttgaattttcttcattctctcaagtgaatctgtccaaaaaaattttgatttctaactaattcatcacaagtagaagcttctctcttatacatattgcatctaaattttagaaacatcttcgtattcctctaaactttgaccccctcctatataaattagagtggtttgggaggggatgaaaactagcctatggactttaaaataaatatagtttactatgataatattttcatttctaactccagttgttaccattgattagaaaatcagccctgtctgagtgttcacattgtccattatagaacacaggcaagagcaaggtgaattaggaagagggaaacaggacacaggttttatttcaaaagagccaatggggacattacaggaatcatttgatggagatgcctattcagttttttatcacaccacacactagtataaccaggaaatgcaaggcactctctgcctactctgcctagcctaccaaattaaatctaatttatttcataaaaagacctaaggcatatagtcatctgaatgactggctcggtacacaatgaattccccagaatattaataggtttgttatagcctgaatgttgatttactgaaagtgtcattccagcctatgcatattgattctcaaaagctaatatgtgaccaaaatgcttggtctgtcaaagctgtcacatgagctgatctgactggttcctttgccactgatgctagtccgacctgatttttgcctcaaagaagcagggggaagccggcggcagcaaaggcaggtggttaggagcagacacctttgaggggcaggtggttaggagcagacacctttgagaggcaggtggttaggagcagacacctttgagtcagagcagtggtgctcagttgccagcgattttgtccccaggggatatttggtcatgtctggagatagttttggtcatcacaacagggggatgcttctagcatctagcgggtagaggcagggatggtgccaaacaccatgcagtgcccacaacgggcccgtgagaatggcctggtctcaaacttcagtagtgctgagattgaacaccctgagtcagactccctgcgtttagttctgatgccgtccgtacccacagcttgctttgggaaaccttcctaagcttcccaagtgtcaactgtctcatctttaaaaagagtgaatcccatgtcctatttcacagggcaaagatggttgtaaaaatgaaactaatcgatgcttactaagcacttgggacgctccctaacacgtaacgtacccagtgcatcttagttattgttagtaaaggaaataatgatacaaatagcagcaacaagaaaggctttcttcaggctggatggcccatctagaggtttccagtgcgtctcagcattccaagaggactttggttcaaaagccagttataggagttcagaaaatggccatgtgcaaaacccagaaattttctttaagctgaaaccctgccaggcagggtctttttttaaaattttcttcaacttttcattttaagttcaggggtacatgtgcaggatgtgcaggtttgttatataggtaaacgtgtgccatggtgttttgctgcacagatcaacccatcacctaggtattaagcccagcatccattaggtattcttcctgatgctctccctccccacaaccccccagcaggccccagtgtgtgttgttcccccatgtgtccatgtgtgctcatcattcagctcccacttataagtgagaacaggcagtgtttggttttctgttcctgcattagtttgctgaggataacggtttccagcttcatccatgtccctgcaaaggatatggtcttgttcctttttatggttgcatagtattccatgatatatatggaccacattttctttatccagtctatcaatgatgggcatctgggttgattccaagtctttgctattgtgaacagtgctcctgccaggatctcactatgccactcccatgccttaagaaataagtagaagaggtcacagtgagtaatagcctatttgagctaccaatgtgctctctattggggatgaggggcattaatgtagatgtcacctttagggatgtgacatgtgaggtaaggatagaattgtagcttattgaagtttagtgaattctgtggaggatccatgagtttatacgctgggaattaatgcaagtccatattctatgagctatgacccctttcctgaccttatagatgaggcctgaaagttcatgaaggcaagcatcctggggctaattagcacttacgcatgacaagcctttcaaccacgctcaatctttatcatggattttcagggggaagccgacatggagcactgtgaaacatttttataactattaaccagtgctttggagttggcctgaaatacaaagccaattcagtcaattaatgcatagctatgaaaatagttatctctatttcacctaactctaagcatctctggcgaagtctcattaacaatgcatgtttttttttttttttttgaaacacaattgttagttgtcacgagccggaaagaacatttatctgcagaacacatagagagaaattgctgagaagtcccttgcatcttctccctagcatacttttacaaaaccaaattcactctcaaacttaaaaagaagccgagggagaaggaagaattctgtactgccagacttcgtgattaaatttagtgaagatgctgagaatgtctgtggaaattctcaaaaagctatgaaacattaaatatgccacagttactaaagtctaagctaaaatacttaaagtgcttatgaaagtcatattgtaagtctattataagatggccttttgttttaataccaaaaagttgtgcaagtcctctaggaaacccttgtaaaaattcaattaacctttgtgcagaaaaaaacaagacccagaaacaatgccagaattggggtcattaaccacgtgctggcctcatggtggagaacagccacgtactcagttgaatgctctgaaagtcaggctagcttgcagggaattagccgtaacatagaaagcattcttcatgcttccctgcccagctaatgtgcattgtactttgttcccattttgttttctaaaacattccaaattatgtagagaaagtatgtatttaaaagccagttctcaaactaactagctaatctatggcggctttctcccttaaagaacttagtcatattatttcatgcatctcttcatattcatattgatgacaatgttttcttgacctaagagtagggacaaggacaactttttatataagcttcctgagggagattgttttgatcctaacagaacctaacactgcacgctggcatgctgacaaatattcttcacacagtcaataggtcatgagaacctggttagtaaatgtttgccacacagttcctaaagcattaatattggagccataaaactttaaatgtatcatttgttgtgaaatctacttgagtaacatgctttaaattattcttgtttttatgttatctatttgaatatacagttttcaaaaattgataaattttgttaacaattttacttgagattgtttctttgaaagccacctacatttttcattttaagtgactgctgaattcatcattgatacagtatgatgttgttgcagtctcccccaccccccgcaaaatgaacatatttatggaccagtgtggcactaatgttctaaagtgactccaacaaactcaatccttgtttcttttggcttcccccctccctcccttccttccttctttacttcctttcttccttccttctttgaaaaattgcccaaactaagtttatatgaagagaagaaaatgacagaggaattgtgccaattcactaatgtgttctagggcacaatcagtaagaacaataataaagtgctcaaacagagtgataggatttcatcttgaaactcaggatttaatgacagctgccttttaaaattaccagattcactacctaccctctttgtgcggcaaaggttctttttttccttgtttgtttttgtttttttgtttgtttgttttgtttttttgttttttgagatggagtcttgctctgtcgccaggttctagtgcagtggtgcgacctcagctcactgcaacctccacctcccaggttcaaacaatcctcctgcctcagcctccggagtagctgggactacaggcacacgccaccatgcccagctaattttttgtatttttagtagagatggggtttcaccatgttggccaggatggtctcaatctcttgacctcatcatccgcctgcctctgcctcccaaagttctgggattacaggagtgagccaacgcgcccagccaaaggttctttttattacttttcctgatgccttctgccccctgtactgggtacagaggtaggatatgttgggtgggagagttgataggaattctttaggaaaaaccaatgtgattttaattggtagagccctttctaaaaaaatcttgatacggtttgaatagcttttaaggaatatgtagaaaacagttctatggtggcatgtaatattttcagttcaaaacactgcccttgactggaatatgccaatgttctttgtggcatctgaagtcaggggcagtgcctgcccacttccacgtgctgctgcctggagcccgcgtctcgtgcttccctcaggaaccccctcttcgtggctgtgaagcgcttttctccttgcccggttaccatggagaaagctgcaccatcagctttcctttccagttaccaatgggttgttagcacactgcttatgaaaatggtttctctaatgctaattagttatagcaatgaaattaaaagcggtgcctgcttttctttattgatactttcagcatgtgctgaggcaggtatttcagataaggcctgaaattactaattatactttctggcaagagaaaacattcacttagcatgtaatgggttagacgttaactctttcttaccttccattgaaggttccagttaggtgatttcctacaaaggagacgatatttcctgagtcttgtctgcttcctgtaatagtgtacttggctccttgtgccccaaagcccagaaccaggaatgcacaaaagacccatcatcgcagtgttattaataccaatggaatcaaactctcgcttctggcattttgtgagtctgctattttaagcaagctgtttaagctctcaattttctcatatgtgaaataagagaattaagattcttttccaggattgttgtgatggtggaataggaaaatagggccagcttggagtgtgcgacctgtacagtcacacagggccccatactcacagggccccatactcacagggccccatactcacagggccccccagagtttgaggctctactgctaatatcttgaaatgctaaatcatttttgaagaaggggctctgtgtctttgttttgcactgggcttcacaaattatatagtcatgatcagataggaaacgctgcagtgataataaatactccaaaatctcagtggcttcacccaacaaaagttcatttctcgctcatgctatggcctgcacacggctgaaggctgccctcctcatcaaggccgaggctgacagaggctcaccttcacctgggcttccatgatcccgcaccagagggaagggagcaaggaattgtgtgctggcccttaaagctctcacctggatgacacttgtcactggtgctcacaactctttgtctagagcaaatcgtgtggcctggtctaacttcaaaggagatgggaagtgcatttccaccttgcacctggaaagcagaggctagggaagttggagaccagccccacactgtcacaatacagggagggggtgccccagtgaccccggctttgtgcaagccacccttcagagggctacattgtaagattccagttttctcctaaaacaaagccaagccaaattgctcaaaagtaaaatcacttaccttttaaaagaagcccttaattttcttattttccaagaagttcaagattcccttgactgtcgtcttccccggggacagagcatatgctcagaaagttaatgttgcagcgtcaggattaaatcctttccagccaaactgagacactgaaaccagcattgctggttccctcattacacttcctcaagatggaagtggcattgctgcttgcgttctgattataaaatataaatgtattattataacacattcaagcaaaatgaaaaagtagaaagttaacataaaaagcaaaaaccagtaagatcaggaatctcactacttattattacttatctttctaggcattttaggatacatacccacacttgaaactttttaaactattagtattattatacatgtgaatgcgtagatagtgttttatgaactgctctattatgggcatgtacgtactaaatatagtgataatgatgctatttttcaaatgtcatcattgtgcgaagtaatcacctaccacacaacaatcatacggcatacagaacgatttagttccctgtcctcaggcctcagttacaggttctagaggcagccacttagcgttgttattccagaaattttctgcacatctataagcaaatatatcttttttctttcatccaaattgttacactctatgtataaattgttttcattgttctatagtatttcattttatgaaatatcattatttgtttaatgaattacatatttatatgatgactatagctgcatcattgcattagtatatccacataaaacttatttacttgtttatttgatacatcatttttgttttgtttttgccacaaagtctcactctgtcactcaggctgggagtacagtggcacaatcagagctcactgaagcctcaacctccgaggctcacgtgatcgtcccacctcagcctcctgagtagctgggactacagcacccgccagcaggctaggctaatttattgtatttttttctaaagacaaggctttgccatgttgcccaggctggcctcaaacccctggactcacatgatccacccacctcagcctcccaaagtggtgggattacaggtgtgagccactgcacctggctggccacatcattcagaattttttgaagaagccacataacagctattttgagagttaaatgaaataatcctttggaaagtattttgtagatcaattatcacatgtgtaactatactgatggtaaacagtaattattttactgtatgtcctatctacttgtgttattttattaataagtgcaataatataattctgcatctacaatgtgtaaatctcacattcccgtggaaatcatactgtaaagagaggcataatacatgtgaaaaagagacacataattgtggaactatagcatgagaagtggtgggagccacactactcagtttgcccgaggcaagctgctttatgcccgttgttcaggagtagctgctactatgttccctttcactctcaaatttgttcagatgaacaataaatcatattgtcatttgatttatgagtaaatcaaccaggccccaaatcttgaaagagacatccttaatctgcctgtgtatattgtcattttattgtcctcagaatagctaaaatggaacacattgcaactgctccttgttaaattagttcactgtgatacagctcaggtacaaccgttcatttgcactttacacaaatctgttgatttaaagccacttttcatgccgctctttcctgcttcggagactggtcgccatcttgtccctctctattccatcctgccaggctgattatcttcccctccagataatactgggaagcaaggaaggcctgcatgagccgtcttcaatatatttgctaccattatcaggatagttacatttgtaatgcttatgcattctaataacatgatgtatctatttaattttcctaatttcccatttgtgatacagaaaactaaaaattatttctaaaaagtattctgaaaacaacttatcctttcacacttccaatgattatccaccaaacaaagttaattttcttctatgctgcaactgaattaagaaaggccatcttcatcaccttgattcattaaccttatcctaaggaaaagtaccagtattttttttttttttttttgagatggagtttcattcttgttgctggagtgcaatggtgtgatctcggctcaccacaacctctgcctcctgagttcaagcgattctcctgcctcagcctccgagtagctgggattataggcatgtgccaccacgcctggataattttgtatttttagtagagacggggtttctccgtgttggtcaggctggtctcgaactcccgacctcaggtgatccgcccgcctgggcctcccaaagtgctgggattacaggcgtgagccaccgcgcctggccaagtcccattatttttttccatcaccaatacaagctgctgatcgcctgcaagaagagtcacttcatgtttttaatacttttaaagccaaatatcttttcaaaatgctgggtaggaaactacacaggaacagcattctctgataattaaccacactggtgagttaagtgctgttggcttttcctcaggatacctcactctccaacatcatccaagttaattagctgacatcatgcgcacttccgtgcctgccttactgcctcattagaactgcatgcactggtttgtgtccaagccatttcacctcagctcgcccaccagtttttctgttagcagctcctgtatgctggctctcggtttccattgccttccttttcatgctggataacgtcttcacagaggatgcgagacagcaaagcacagtctcatttcgttgtaatgacggaatgtcccagtcagagccaaagagtgtagaaattccacactaattccagcacatctccagtgttctcagaaatcgatcactgtgtgactaaaccgccagtgtcaaagaaacaaatcggtgggtcttctgcctcccggctgccctgacttcctgacaactgttcttttcctgggagccatttttaatggcctttttaatcaccatcatcaacagtggggaactctcaataacatcttaagctttaaaatgtttttgaaagtgagttggagacgcataaatatttagattttctcaaggaaaagtgtcttaagtgtctgagttctaaatttgagccaagttttctttgaaaatgtatcccaattacagttgtaaatagtaatcccacaaacaaaagcttcggggggaagttactaaaaacagttgaattccctaaatgttgatttccccacacatcagaagcagcagctttttttaggatgtaattattttcctgatatacattctcacactcctgggaaagagttttagccattttgtactagagatccatttggcagtttgatgaacagtttggacactatcttgaataatttttttttttttcctgagacagagtctcactctgtcgcccaggttggagtacagtggcgcgatctcggctcactgcaagctccgcctcccgggtccacaccattctccggcctcagcctcctgagtagctgggactacaggcgcccgccaccacgcccggctaatttttttgtatttttagtagagacaggctttcaccgtgttaaccaggatggtctccatctcctgacctcgtgatccgcccaccttggcctcccaaaatgctgggattacaggcgtgagccaccgcgaccagcctatcttgaataatatttttaaatatataaaatatataagattgaaaggaaaatgcagttatcagagtaataaaaagaaattcatggtttttaatatgtgtttctttatgaatgaattaaataacaagtcaggccaggaacagtggcccttgcctgtaatcccagcactttgggagaccgaggcgagcagattccttgagctcaggagttcaagaccagcctcggcaacatggcaaaaccctgtctctacaaaaaatacaaaaatgcctcagctacccaaaaggctgaggtgggaggatcacttgagcccaggaggtcaagactgcggcaagttgtattgcaccgcggcactccagcctgggccacagagcgagacctcgtctcaaaaatatatgtaaataaaaataacaagtcaataccgtgcatttaaaatatagcaagttaaagtaaaactttattgtttaaagaaataccagtgcaaagaacatttttgctgagtttacctgggaacaataaaccatgcatgagaatgagtaccctccttcctcgtgatgaccaaaaacaaatcgcaaatgggaatactggaaagcaacgtgaatgtctgggtcaccagtgtgggaagaggtgactgcattcccccaagttggcagctccatcacaccagttgataggacagcagcgatcacatgcaatctactataagtataggtaatagtgggtcaggcatggtggcttatgcctgcaatcccagcgctttgagaggcaggcagatcatgaggtcaagagatcgagaccatcctggccaacatggtgaaaccctgtctctactaaaaattagctgggcatggtggtgcatgcctgtagtcccagctacttgggaggctgaggcaggagaatcacttgaacccaggaggcggaggttgcagtgagccgagattgcgccactgcactccagtctggtgacagagagacttcatctcaaaaaataaaaataagtaatagtgggccgggcgtggtggctcacacctgtaatctcagcactttgggagtctgaggcaggtggattacgaggtcaggagatcgagaccatcctggccaacatggtgaaacccagtatctactaaaaattaaaaccaaaaaaaagttagccaggcatgatggcgagtgcctgtagtcccagctactcgggaggctgaggcaggagaatggcgtgaacccacgaggcggagcttgcagtgagccgagatcacaccactgcactccagcctgggcaacagagcgagactccattgccgaaaaaaaaaaaaagtaatggtgaacatagttggtatttcaaggtgtctacagctgctctaaaatcatacgaagatatctgtgattctcatctatgactaagtcacagataccactaacactactgatattcatacctatgtttataactgaaggaaacaccaaacttcaggtagggattagtgatattaaatatataattaattcccatccaagttcacaagctccacggactcctgttaccagtctcaatcttataggaaacaagaggcttggtctatggttggagcaggaaagacaagatgaaggagaataactatggggtagccaacaaggtaagagttatgaagagccattacacaccaggccctgtgctgggcacttccgtggagtagccaattcattcctcacatgactgcaccatttacttgtacatggtactagtaaacagtggcgccataatacaaatccatgccaccacaggagaggtggagtgacttactggtaagtttggaaagagtaaactgatcatgctccacgcccatttttttcttggtagcagatgctctgcagagaacttatattctgctctgtttttcgaggaagtctggctctgcctaagcttgggtggatagatttccacaagcataaaatttgatattagaaaacccgctagtctacatacacaagtcatgccctccatcctagcgatcttgtatataaaaatgccactccacctgctctcctttcttatttacttatttttctattatatatagttaaggtgtacaacatattttgatatatttatacatagtgaagtggttactatactcaagcaaattaacatacttatcatcttcatggttacttttttcatacgtatacagtaatagcacctaaaatctacttttttgcaaattttcattatacaatattataattatagtcctctagtacatttctagaatatttgtcctacctgtaactttgtatgctttgacccatatctccccattttctgccacaattccccccaccacttccggtaaccaccattttattctgtctctatatatttgacattttttttttaagattccacatgtaagtaagatcatgcagtactttttcctgtgtctggctcagttcacttagcataatgtcctccaggttaatacatgttgccaaaaatagtagaatctcctttttaaggcttgataatattccattttatatatatatatgtatataaataaatttatggatatataggtatctatatatataatgctcccctctccctaatatatatgtatataatatattccacaatttctttatccattcatcctttgatgcttacttaggttgtttgcatatcttgctattgtaaataatgccacagtgaacataagaaggcagctctgtgaggtgctaattttacttcttttgagtatatactcagcagagagattgctggatcatatggtgctatagttctatttttttattttttaaggaaccttcgtactgttttccataaaggctgcaacaatttacattcccaccaacagcatgtcagggttcccttttctccaacccgtgctaccgcttgttatgtctttttgataatggccatcctaacaggtataagttgctatctcatggttttcatttgcctgtccctgatggtcagagatgttgattaccttttcgtatgcctgttggccatttttatatcttttttggagaaatgtctattcaggctctttgtccgttttttaatcaggttatttggggttttttgctattgagttgtaggcatttattttacattttggatattaaccacttatcaaatacatggttttcaaatattttcttccaatctgtaagctgccttttgattctgttcgttgcttcctttgctgtgcagaagctttttagtttggtgtagtccagttgtttattttcacttttgttgcctgagctttggtgtggtatccaaaaagttattgccaaggcgatggggtttccctgtgttttctactaggaatgttatgatttcaggtcctatgttaagttctttcatctatgttgagttgatttttgtgtatgatacaagctaagggttcaattcattattttacatgtggatatccagttttcccaataccatttattgaagatattatcctatccagataccattgtgtcttcttggtgcctttgtcaaaaattagttgacccatttttcttttcaagctgagacagggatagtaggtgtcatggattgggtttccttaaactcccaacacgttctgcaagtaagacttgctctcttctaaaggcatccattctattttcaaacagttctgatttttacaacgtttttctttatatctagctaaaatcaacctccctctgttgtcctggggtacttggaagccttagtccttctgtgaagggcttatccttcagtcattaaagcaggccatgaagaagattaccaactctacaaaacaccctggtccaaacatgcatgtgtccttccttcttaacatggtcaaaatactagattaggtttttcaaaaatttttcaaatgagagagaacttcttcttcataggcttcagtatttttttttaatgtctcccaaagttggtattgaaattaaacagattccaggtgaggtcttgccaccacatagcaaaagaaaactatccacaccttcagtttatgctgtatttttctattagtgttaccttagattaatttaatctttcatagatgcatttattgtatgttaattatctttatgacacatgttctgttaagctataactcccacagccaatatagctgttacatatattctagtactgggatttaaactcttctctaaaagtcggttctgtaatcttgttagattacccagtgatgtcagacggtggggggatgtttttgaatcctgattctgtttccgatagaccatccaattcaagagcatatagaaattaggtcatcattctgtcaaggtctattttcaagttgttaatgaaagtgcctaagaggatacattcttcattacccaatccatatttctccatttctttctttttcatgtcttgaagatttgttgttttgatttggtttggtttagtttggtttttcatcctagtctaatgctgacattatactgggaacttattgaatattcataagtttgaattcataaacaaatattttcttattataaagctgcttacgtaggtgtatatctgtaagtgaaataaaacaacatccccataaccccaaaactcagacattgcagactctgctaatgtttggctatatttctttctaggctttttgaaagagcatttttctaatgtacatttttcactctattcattacctggcctttctctgtctctccctctattgagagggagtggttagtccagtcctaacatttgcaggacctgggataagaagacaagtgtgggttcacatggccctcatctcaatgtttaaaaattctaaatcacactagcaagctgttaaataaaatacatgctatcctcttaccttaaggagtacaccttcataaggaccttagaggccagattctaacttagaattctctgacccctcagaattctttaccagaacttagtggaactgggagagtcagcccagaccccttctcttgtctagctctgccctgcctagaaggttctctgcacacacataggcagacacccagcccacaaatctcagattcatccacatcccctacatgtggcagcccttcaggcagccttcgggctcagggtaggcacatcactggaacagtccactctcagaaggacagatgggaggaagctgcctacacaagccctgaatcaagcccaggccatttgggcagggaattctggggctcaggtgcctggggcatagtctgaagggcaagcatgtgctgttgtgggtgcagctttttagctccacagactctttgctccaggaagaggggtgtggccagaggagggccagggcagaaccctctaagacataggacatctcttgagtgggtcaaagggttagactgggagtgcttctcaggtaatccagagtgtcctgctctcaggaagttctgatccgttgagaattactcttgagtgttcataatgggagttccttctacctagaggaaaacctcaggtcttccaccactcccagctccagcagaagagtgatgagcactgggtagagccgttgaagaggggaatgaagatttagatgagtgactacattaaataataccctaatgggcctatgacagcaaaggtagtaatataactaaagcatataatcaaacacaaaaattatgtggcatagactgtacaccattattttagtgtaggttacaaggctcagactgtctaggtttagaccctagccagagttcacttcctagctatgcaattttgagcaaattaacttctctgtggctcactttcctcttctattaaatgggtgttttttaagagtgcctaccttggtgaattgaaggaaactatgtatgttggatgttcagcctagcaatgcccggttcatagtaagcactttgcaagcattagctaatttttaagcggaacaattattattaccactattattaatgctatgctatagcttctatgagaaaatgcaggctagtggtcctctacctctcacagttcagtaatatgtgtattagtttccagtggttgctgtaaaaaattatcacaaatgtcatggctgaaaacaacacagatttattttcttacagctctgtaggtcggaagtcctaaagttaaggtgtcgcagggctgcattccttctggaggctgtgggggagaatcctcttttctcccttttctggcttcttgaggctgcctggattccttggcttgaggtcccttcctccatcttcaaaaccagcaaagtaaccttcaggtttcaatctctctctctttctctttctctctctctttctctctctctctctctctctctctttctcttgttcactggacccacctggatagtccagaattatctccccacctcaagacccttaacctactcatttctgcaaactcccgttgcgatgtattagtctgttctcacactgctatgaagaaatacctgaaactgagtaatttataaagaaaagaggtttaattgactcacagttctgtatggctagggaggcctcaggaaacttacatcatggcggaaggcacctcttcacagggtggcaggagagagaatgggtgcccagtgaagggggaagcctcttataaaaaaagtcagatcttctgagaactcactcactatcacaagaacagcctgggggataccacccccatgattcatttatctccacctggtcccatccttgacatggtggattattacaattcaaggtgacatttggatggggacacagaaccaaaccatgaatgctaccatattcataagttccagggatgagtacacagacatgggggaggtggcagtattgactctttggcagcattttggtggggagtcattaggagatgcatgaaggaattttacttggcctgtagggagcgcccatttgtgtactgctgggttttaaagtaggaggaagttgccttggttgtagtcagcattatcagttaaccaggttggtgttgagtatgtcttatgggaaggactgacaggtgtataggctgacagtgagcatgagggccttcaactgtggccacaaggacaacttcacaaatgaatgaacatacactgtgcatgactttcctgtccttgagaagaacatacccaagtcctctgaggctggatcctcccggcagctgcattagtggtaaatagcagagtaattccccggccatggatgcaaggacaggagatggtaacttagactgtggtgacaccttcacttaaatctgagccttcctgaaatatgagtatttgaaataatagcagacgacattgggcagatttcagtaaaggatgaatgcatttttaagtttctaaacatgttaataagcacatgtcaataaatggggagtgaggcaaaaatggagtcaggctgaagtacccccttgccatttaaaggatactctgtaggatttgacatttattatggttgacttttcaaggctgagtattttcccagacccactgcctcttctctcttcctgtctacacctggcgtagtacactatttcagattgaagattaggtttggctgttttttttttgtttttgttttaaagtatagggtaagaggctgggcatggcggctcatgcctgtaatcctagcacgttgggaggttgaggcgggcggatcacctgaggtcaggagttcaagaccagcctggccaacatggcgaaaccccgtctctactaaaaatacaaaaattagctaggtgtggtggtgcgtgcctataatcccagctactcaggaggctgaggcaggaaaattgcttgaacccggaaggcagaggttgcagtgagctgagatcacaccacttcactccagcctggttgaaagagtgaaactctgtctcaataaaactaaaaataaaaataaagtgtaggctaagggagtgagaaggaatagaattttactctttctcacatgaaaaaaaaaagctggaagtatgcaactgacggacagtgtgggacctccatggtcacaagggagccatggccattcctcctgagaatgtagctccctggaatccccaggaaaccctctactcacagctcactgatcagccctaatgcaagcaaggctggaaaagtagaattttgctgggcacatagttggtgttctgttactgaggaagaagaggaacatgaatattgggcaggcatttgcagcctctgtcgctcctgcacatcctttgagactcctctcaagcgtcatcatctccaggaagccttccctgtatcctccttttaggctcagcacctctcaacctgcattcccatagcaatctgcatgtttctctgttatacaacagtaaagcattgtattaaaattgtatctaggtcttccccattggaccatatgcttacagagaaatgcccatcttactcgtcattacactcttaaatgcccagcacatacaagaacttggtaagtgtgtgctggactgaacttatcagttaataacgtatatactccatagggctagaatcgtgttcgtattatatgtgtctatatcaaattcaccgcacagtgccaggcacacagtccactctcaataatatttactgatgaatgggtgaatgaatgaatgaatgagtgaattatacttaagacagaagggtgtagatggaagaagtctctctcaaaatgccactttcccagtacattgaaaaaaacaactattcgtcagcacaaatggctcccccagcagcaggacactgatgagcagtaatgagagaggctttttaatccagaggcaacagtgagaagaaaatgaaatcagtggcaaacaatcctggtttctgggatgtagaacattctgcagagagaagttggcttgtatataaggacgcgaatctagacaggaacctcttgatgagatttcattcctttgccctgaaaagaatattttatttctgccaccagaaacaaaagaataaaaatccctcattaactaacttcgtgtgactgtcccagaaaggaaaaagcttgtatgcccatctgagaaccatagtcttgccaagagaaccctgagattccactctttttgggctctacttgacagctttgaaataaatctatcaatcacttgtcagaaagcctgtccttgggttgtttgtatgtctgtgtgtctgtgtgtggatgtttgccctagcagtatggctgcatatttatttaaggttaggccctcctgttactttgagtgcagtccttaccagagaggatggcaaatctcagagatgtactggcttatcttttaatatgcaaactgtaccttcatcctaacatccacagtgtctgagttagttgagcaagcagaattgtttaagcttctgcctaaacagatcagagcagatgagtgcaaaaatagaaactagttgactggaggagaaatgataaaactattttctagatttctaccgtaacaaaaagaacaagccaaacagcttacatagtttcagagattttttaacccatcagagagctgagatcaaaaaaaacctaagtgaagaaaattactaaaagtaataagactttcctggaagagaatgttatcagaattgactaaatcattcaacaggttaacagaagactgagcagaagaggtaagtatcaatgatcttgaagagcggtcaatataaactgttcaaatagaaacacagggggatctaatgtacagcatggtgactagagttaataatgttgtattgtgtacttgaaatgtgctaagactaggtcttaagtgtcctccccacacagacacacacacacacacacacaaagataactatgtgtggtgatagaagtgttgattaatttgattgtaattattacatagtgtatacagatatcaagtcattattttgtatgtgttgaatatatgattattatttatcaattatacctaataaagctggagagaaaggaaacacaaagtgaaaaaaagtaataaacatagaccagagtatccaagatctggtgaatatcaaacactgtgtaattggaatccaagaagaaaaagaaagagaatgggccagaagaaatatttgaaaagataatggtgaaaacttttccaaaactgatggaaaacatcaaattaaatacccaaaaagcacagtgaatcttaagcagtagcggtacaaagaaaacaatgtgttaaaacaaattgcagtcaaaatgctgaaaacacaagataaggagataatgttaagagctgccagagggaacctcattgtatggagagcacggtgataagagtgagggctgacttctccatcaaaaacaatggaagccagaaaacaatggaatgatatggaaagaaaaaagtatactaaaattccatgtctagtaaaaaaaaaaaaatccccaaaagaaaggcccccaaaaataacattttcagatgacaaaagctgacagaatccatcagacttgtactgcatgaaatactaaaatcacgtctgcaggttgaaaggatatgaagtgaagcccagatctgtacgaaggaatgaggaacatcagaacgtataaaaatgtaggtcagctccaagatgattttttaaaatcccaatgttaagaagtcatcattattaccaaaagaagcaagccagaaagcatgtcgcctttcaaaaagaactagagcagtaagcaaacactgaggcagaaaggcctaaagcaggtcctgcatgggccagtctcgacggtatgaaagaagactcaccgtctagactgctgtctctgtcgctgcgactttttgcatactccaagctgcaagagtcagtgattgaagggctttctaacctctgcagctcacctggagaggatcgcagcctatcgcttttgttgaccacaaggacctgagctctgcagaagcagttgtcacctccttgaagagctaaggcttccaaggagatattttgtgggtcgaactggctaagcaaaggggagcaagtgacccagcaagcaacaggtggggaagccaaggtggaggaacttgtgtattgcctgatggttttacctgacatttgactaattcgtttcactggggattcataagagaccttaggggcctgtatgtcagaatttgaggtgtgacttactttggagcccttcaaggcattatttaattatttggtaattcatttttctatttgtctgctaatgaacatgagtttacactttctgagaaattaccaataccaagactgtagttacacaaagaagttcaatgatttccttaggctaggtgggcataggatggtgttgactgcagatgggcgtgagaaaacctttttcagaacatggaaaggttataaaatacatcctgattgtagtggtgcatatattgccaaaactcatcaaagtatacaattaaaactgacatatttcatattatataaatgatatatagatgaagtttctttaaaaaagaaaatctgagattcaaagtttccaggaatgaaatgtgacttccataggaattggccaactccatcagttttcccaatccaatccctggcttgagaaagtaccagctgggcatggtggcccacgcctgtaattccagcactttgggaggctgaggtaggcagattacctgaggtcgggagtataagaccagcctgaccaacatggagaaaccctgtctctactaaaaatacaaaattagctggacgtggtggtacatgcctgtaatcccagctactaaggaggctgagacaggagaatctcttgaacccaggaggcggatgttgtggtaagccaagattgcaccattgcactccagcctgggcaacaagagcaaaactctgagccaagatcacaccattgcacttcagcctgggcaacaagagcgaaactccttctcaaaaaaacaaaaacaaaaacaaaaacaaaaaaaaccctaaaggtctctgtatgttgatgtctaccatcctagctctatggagtacagtatcttaaatataagtgaataatactataatattgtgggatagttgcagggcttggatttaggtgcttccaaaatttggatggaaatgttggaaaagtgatcactagataaagattatacttccaaagtggacacttgatctttaccactgtgtatgcagttctgatgttgctttagctggggctgagtttcagccaagtctttccagcttatagtacattgaatttctcattcatgctgaatcaaaactttggcctttacctgtaaagtttcagtccatgggaaccaagaaatgggaatactccatatctggatatcaagatggtcaaagaaagcatctggtaggtatagtgtaggttgatgtaaagatccctccaaccttggtagttgatgccctcagaaaagtgctgccagatcccaaatgcatcctgtccaaaatcaaggaggggcaggatgatatggccaatttcaggatttttaatgtcttcttagactcagttgacctctggaaaacatgattcaagagccagttaggcaggatcagtaaggataagccaggtagaaccaaacagtcgtcattctgaaagctgggaaagttttggcatccttggtaacaagggaggaggggtcaggagaggcaccagctgacagtgaagctgacctggcagtcaccttccagaggccgtgctgaatctggatgcctcaggaattctactggtgccccatgccaccttcttcaataatatatcactgaccactccagccagaagggctcacactgaccttggaaccccttggtgctcagtcacccataattctcattaggtagttttttctctatttagtatttatgtaagtatttatctctctgactttcctgttgcttccagtacattgcagtctactatacatagaacttctgacatcttcatgcccctatagcctactgtagtgccttgttaatactaagtgctctaccaaacaaaaaaactgagtgaagaaatcctgaggaaatagaaaatattattggcctcagacctattaagccagtttagaacaaaaaaatcatggattatttaaagtatgccaattttgggatgaaagtgtattctgtgtgtttttattgctaccgttctccagagaaacagggtgatattttccagctacagaatgttttagcagcaattcccaacgaattcagcttatttttcagcaagttaacctctgttaatgacatattaaattttgatttttttaatatgatcaccctggggagacattcaaagtagaccttttaaaataagggtgagctatattgctgatcagacatcatggtgtcatttcacttcagagaatatttttccagaaagacacacattttaatgactggtcaaacatactaaccatcttatctttgctttgggccatataactaatttagctagtcattagcttcaaggtaatggaagagcacgttctacagtattaactgaataccaaatcagctcctaaaatacctctccctgtggtatttcgactgaaaaatgccagcttatgccagcttataaaccacagatagctggaagttcaggtgattcagaataaaagcatgctgtctagataacattgttagatgtaaatgattcaggctcacttttgatctgatctctctagatggactagactttggtcatattggaagacagtagaggctaatattgtgcaaagatgaaaaggatgagacaaagcatgtgtaggtccctaccgtagtgagtccccgctcattgcaggtggcggcatttggcactgttgactgttccctcccctgctagcttgtgggtgcccttctcacccacctttccagccatcttcccccaccattgccatccttcacagcccacattgcaagctagtcttccacctgccctttaaccgctgttattttcaaggtgaccatccttggtcctctcttcaagccaagccctccctcagaccttctcgtgtatttctgcagttctgactgcctatagttgataggccccaagtctgtgtctctaactagaccattctctagagctcctggattatacttcacattgcctactggatacctccatttggaattttcataagcatttcaaatgtaaaatgtcaatatttgagctcatttttccacctcttccctcacccacatgcaaccctgtcctgtctcttcttacctcggtccttgcaatgagtggcacttagaatcctccgtgcatgtattccagacccttttatctccagtggctgactgataactgattgattccagaaggccagtgattcctgcatccacctcctctttcctattaactcagggtccccactctttacctcaactactggaacaacctacactcttcctgccttgagtgtattccccctagtaatccatcctttatccccataccataaaatatgctcataacaccccccataaagtgattccctagagcttaaaaacctcagctccttaagaccatctactttgttttctggaccctctggcctcatcttccacctaccctccctctccaccatccccctcatctccagcgacaccttatacttaactcatgttgaaccatttccgggtccggaactcactgagtacttttcagacctccagacctttgcacaggccgctgcttcctctgagccactggctagcaaaactctttctctgtccctgaggacaaacttgacgttcagttctgttttctgaaaaactgatgcaggtggaatgtttatggggttaatagacagtaagtacttatgataaagatgactcttggaccgggcatggtggctcacacctgtagtcccagtactttgggaagccaaggcaggcagatcatgaggtcaggtgatcaagaccatcctggccaacatggtgaaaccccgtctctgctaaaaaaaaaaaagaaagaaaaattagctgggcgtggtggtgcgtacctgtagtcccagctacttgggaggccgaggcaggagaattgcttgaaccagggagtctgagattgcagtgggccgagattgtgacactgcactccagcctggcgacagaacgagactccatctgaagaaaaaaaaaaaaaagataactcttggttggtgtgtgggatcttgacaggcaggactgtaaatgaactataaatacctgggagaagccacagctgtggacatccctggaagtcatgctcacggcgatgaagttgtgtcttcttcagcttggccttgtgcccccggaactcctgccagcacatgtggcacctggggcttctaccccagcattgctccttacctaccagcatgtctccttccccaaacccaagtgatcacgggggttcagagaagtgtcccctggcccttcctgctgatatgctgcttcttgtcctgtgtccttctaaatgactccaatgccaagtatagcccattatattccagagatcctaaatggatatttgggcctgagactatccagagggagtatggcacctcctttgcccattattcccaagcaatatctaacccacttttcaagatcttggtcaaaggcactctcctctgtaaacacacggtgcccatcaacaagaattaaataaaataatcttttgttgcaacctctgtgacatcctaaaataacacggattatattcctattataaactttggttgtattaccaccaaaatctgtcctctaagcagatgacttattgagggtaggatcaattgctgtttatatttgttcgtactattcctgcaccatgcctgcttcaccctgtggggacacattaaaagttgaatggttggatgaatggatggatggatggactgatggatggatagttgaattaaaggaaagaagcatatgtgatttgatggataaatagatttttttttttacaaaatatcaacagccattttcttatctaaataaaataatgtaagcagcaccaagaaaccaactttcaatataatagtttctgctgacccatttctgggccagaaatctcccattaggggtaagtcattgaaagcctctaaattatgaagaaggagacaaagagaaaaccaaataactgaactgttataattatagcaaatgttatggtggcaccagttagctagtttcctaggaccctggacaaatctacatataagtggaaacctctaaacagcgatgagaaaaacgggaaaatagcttgcttgtgagggagttctagggctgacagcaggatggatctcagagaagctggggcatcaggaaggcctgctaccctgtgtgccagaagctctaggcattcctgtgaacagatccagggattcagggaattccatccttcccactactttgctcagaaccaggtccctgcactccacactaagaaatggtggctccatttgtaaacaggcctctgatttatttcaacatgtgcacagcttggactttctcaaaagtaaactaaaaccaaatgaattacttaattcacaccatattctggaattaatagtcacttcaagggcatttctgagaatgttctcattcttaagagagagaccacagcatttcctttaggttgcagactggcaggaagagaagcccacaaacacactgactgtcaagttcgatcaggtttccactgtaattaacctggagaacaagtcttacctgaaaaatggtgatcactgagggcaggtgctaagtaccacttctgaaagtagcttcttttggctactgggccactaacaaggccctggctgtcagcagacactctctgaggaaggaagtgcttgtagctttagaaagctcagccttgccttaaaatccctcctggatactatcatggttttcattcctgtcttccctccagataagatgaagggatttgaggctgtccaaataaagatatgcactttaaaaagaaaaaaaaaaacatgaaaatggcttctggtaattataaggtttagaccaaggatactagcaagtcatagtgaccatatgctcttcactttcctaaaaatttacgaatttctggcaaagtcagtatttctccattgacaagcttgcctacccacagcctaacacatgcagactacagaattccacagacatggagttactgtcatggtgagcacgaagctaataaatttagtgcccattgctctgtagaagaaaacaaacatatattttaaacacaaactttgagcttaatggctgaaatgtttttgtaccttggaaatgctcctttgctattaaatcaagggtaatcatagttcatttaaatgtaggaaggaaataattgatgttttcacattactgagcatttggttcaaacactggctctgcagtaaacagcatgcagacattttaggagacaggcagccggcaggaggtagacagacggctgcctccaccgcggcgagggccagggagctgtgataacggcttccaggtttgcatcagctgcacttatggtcgatcacaccaggcacccgagatgctggatgaaagtgcttcacaattccccctacttaataattaaaatttcaatcatattctccaataatgatcatgattaaagaatgacaacacgtttctgaaatctgtaagtggcagcagagacaccaggccttctttagctcgataagcagctgcactaagatttatttatgttctgtcaaacccaaaggttttcttaaaggaggctaccctttttctttcaagctaaaggaatctgaatgtacaaagagctgtatttctctttttcttcttataagtattcccataacagctaggatattctatttttctttccagagttttgagcagcccaagtaaatcagaaggcggtcattgtctgcatgacagttcagcttgtgtcccataaaagcccacaacccttgaaacaccaaatcaccttttctgcaggtcttttgattattggcgtccttttcccaaaaaactacaaaggaaagacaaaagaaggccactatttctttaacttacatgtgcggtcatctacaaaatgttggacttcttatcacacatgttttcatattaagagtgtggtaacacacacacaggaagttggtggttcccattctccctattttcagaaccagtctcttctctagagacacgtttgtacctaacagtagattttcatattccttgattttgctttctgaccttcttggagttttcagtaatgtatcttcagccctcagatcacagagcattcattaattcattcatgcatccattcatcctcccatccatctatccacacattcagcagtcatgtcttatcattgttctaggcactgtacataaatataaacatgaattttgagttatttatatgacatccatgtatcctttcagaatacagttgtatcattgtagggcaattagaagaggtaatttctattaaagtagtagcttttttatttgatgttttcagtagaaattactagagttctctattcagtagggatgcattcagagttagtgtcaatatattgtgtaagtggaggaatcttgaatagttggatcctgcattggcccagctgcccatcctccttgcaaagtgcttaacagagacacatgtgtaggaaaagtaatggaatgcattattattagccttggctttattacaaaatctcatgggtttaactttggtaaaactgggtgtaccgagtggagaactcctggactccaaagaaccaagcggtctggaagagagccttgcgtagcgaagacgctcagtggatatttgttaaaggaggaagttggactattcagccttgctctcacaccgcccttccacgcccaaacccaggtcctgaactcagctctctggtaggaccacagtggaggcaaaggctctgagagggcaagtgtttggcttcaaagtccaagtaccactccaggcctcttccagctgccacactacctctgtttgcctaggagaaaaggttccctgagcaatgagaccatctcttctcctgaggaagccctgagctctctgggcatgtgggtggaagaggaagaggaagggtcatgtgcatgtaccccagaccctttcaccctctgaccacccatacaaagcagacccaggtcagcattcgcaaacccaaagagcagctttcttttggtacagttcagtgccctgtccttgatcctctttattcttgggcaggattcaagctggtgatgtgggagattattagtcagggttctctagagggacagaactaattggatagatgaatatatgaaggggcatttattaaggagaattgactcacacgatcacaaggagaagtcccacaatagactgtctgcaagctgaggagcaaggaagccggtctgactcccaaaacctcaaaagtagggaagccgacagtgcagccttcagtctgtggccaaaggcctgagagcccctggcaaaccactggtgtaggtccaagagtccaaaagctgaagaacttggagtctgatgttccagggcaggaagctttcaatgcgagagaaatttgaaagccggaagactcagccagtctaggccttccacacccttctgcctgcttttatcttagctgcactggcagccgattcaatttcgcccatcctgactgagggtgggtctgcctctcccagtcccactgactcaaatgttaatctcctttggcaacaccctcacagacacacccaggaacaatactttgcgtccttcaatccaatcaagttgacactcaatattaaccatcacaacacaggagccctttgcttcccctagaggccaacgttctccttaggaaaacattttttcatagtgattttgaactggaagaaactataaacacacatggccagccttgaaattcttttcaatatttgtttctctataatatgttgatatgagttaaagtatgtgtatatgtatttatttgtatgcacctaatttttttttttttttttttgagacggagtcttgctgtgtcgccaggctggagtgcagtggcgcgatctcagctcaccacaacctccgcctcccgggttcgagagattcccttgcctcagcctcccaagtagctgggattacagacatgtgccaccatacctggctaattttttgtatttagtagagatggggtttcaccatgttggccaagatggtctcggtctcctgaccttgtgatctgcccgcgtcagcctcccaaagtgctgggattacaggcgtgagcccctgcacctggcctgcacctaatatttctgtaacttcatggcaccagggaccggatgtgatttcctccactagaatagcctacactgataggcctctataaaaaaaggaatgattaggatgctttcatttgaaatttttctactcactgggtagcatttagtaggctgatgtaaatagcaagtcattcatgcagcaaatatttctgcagtgttttctgcatgctggccattgtgctgggtgtttagaacacagcgtgtcaggccgggcgtggtggctcacatctgtaatcccagcactttaggaggccgaggcaggtggatcacaaggtcaggagttcaagaccagcctggccaagattgtgaaactccgtctctactaaaaatacaaaaattagtcgggcatggtggcaggcgcctgtaattccagctactcaggaggctgaggcaggagcattgcttgaacccggggggcagaggttgcagtgagccgagatcataccactgcactccagcctgggcgacagagtgagactccatctcaaaaaaaaaaaaaacacgtgtcaaattaaaccaaactgacagtccatcgtctcaagaagtctatgttctaataggagagacaggatatgacaaatctagatgtaatataatgtctagagaaaccagtgttatgaagaaaaatatagctggggaagaaaagacagagaaactgagacaactgggggagtggaaggatgactttagacaggctagatggttttactggagaggtgatgtctcagcagtgacctagatgaagttatggaccagagaaagtcactcaggaatccaagttaagtgcaattggcctccagaaagtagtcaacctaatgggacttcagtagccctaatggtgggctggatttctcacactggctttggtgcttttcaacccacatattctaaatttcagtataactacaatgctggcgcaaagttcccccaaaataaacttgggcttgctccaagaactaacagtttcaaaaccccagatattaagaaacttccatgactatcattatcattgagttagagagcacaccaaaagcatagaccaagcttagaacctggaacctggactcaagaccacgaatgaactgctgttcctcctgcctggttaaggaaggaattggaaaggattcctcaagcagtcaagggtttcccaaagccaccctaaccccagccagtgccttcttcaagaacttcagagtatggagaattacccaaggatctaataacgtgagcctgaggtctttctttcacaggacctaggataacatggaaagtgagctcaaaagacacaggctatgtgccgtcagtgctaatgccaccccgacctatagaacccatgctgccgttctgtgacccaaggggacatcgccaaaatgctgctggcaaccctagcgagttgtgtacattgttacttttaggtttccttccatctcagaaagaaagaaataaaaagaaaccatgtgtggtctgtgcttgcttgacaaattagtctctcaatgtatttactgacatcagaatttgcattgcagacaccaagaaaacacttctgttatatattgtagtaaagaatagtaatgctcttttagttcctcatctcattaaataaaaaataagatactaatctttccctctgaagaattcaactaccaactggtacattactgatttttctatgtgaataatgtgtatagtaacaactagtattcccagaaagggtaatcataaagttaactttttttgaatttggggagaggggaaggggaggggaggggaggggaggaggaaaggaaggaagggaggaaggaagggagggagggagggagggagggatggaccgaccgttgtgcattagttggagttctctttatttcaaagaattgacttacatagccatggaggcccccaagtctgaatcctacagggcgggccagaaggttgggaacggagcaggagctgatgttgtaatcttgaaacagaatttcttcctctgagaaacctgttaaggcctttcaactaaatggatgaggcccgttaagattatcaagggcaatcccactgattgtagattttaaccccatctacaacataccttcaccacaacacccagagtaatgtttggttaaaaaaccaggtactagagacaagccaaggtgatagaaaacacacgttgtttatctacacaggcaagagtctgagaagtatctgaaggatttaataacacatgcacacacacacattgtgggagtttctatagcatgatgattaagagtacgaaatgagtgacagagccacgacgttaagcccaggcagtctgactccccgccctcctaactgctactcagtactgttcactggttcaaggctcaggccctcattggctataaaggattgaatattccattttttaaaaactttcatcaaatagattgtgggaatgaatggccttagaatttgcaactatcaaaaatggctatgagagatatcaaaaatgcgattgaatacacgaagaatgtgtgtggtcctgtatagactttgacaatacagaattttattaagcctgacgtgaccttgagatggaaatatatttatatcttaagagcacaatagtgcaaaattctgccaagtgacttgaatggaggtattttatatatatataaaatatatatgatattagagagagagagagagagaatttggatttaaagtcaagggctccctgcccctcgcctgtgggttatggaatcatcactatggcaactataaatagggctccatggaacccacttggtcaccatgaagaatctagtcagcaccccagctaaacgttttgattataacgcaactacaagcaaattgagaggacaatcccaaaaataatacaggaacatcacctaaaatagttgtgtgggatggtgcaatagtttccttagtagctaatcatctttcaccctaaaagatttagaattaagtagagaaatgttttaaagaattaaaaaacacagaaccaatattttgtattaaggaatttatacatacttgaacttctaaaggaatgtggttaattagtgaaacagctcagccttgtgacttagcttgaaacacaattgagtaattgactgaggctagggatattaaattgaactctgacaaagtttgtaaacagtatcaaagcctttcagagaacttaaggcgcactatatctattgctttgatttatttataagttatttaagtcctcaggaaaaacaaaactattttttaaatcagactttggaagtacttaagagtgtgttaaggccgggcgcagtggctcatgcctgtaatctcagcattttgggaggccgaggtgggatcacttgagatcaggacttcgacaccagcctagccaatacggtgaaagaccatctctactaaaaatacaaaaattagctgggtgtggtggtgcgcctgtaatcccagctactcaggaggctgaggaaggagaatcgcttgaacccgggagggggagggtgcagtgagccaagatcatgccactgcactccagtctgggcaacagagtgagactccatcccaaaaaaagaaaagaaaagaaaagaaaaaagtaaaagaaaagaaaagaaaaaagaaaaaaaagaatgtcttaaatttataaatgtagtttacaacgtttaaaggtgacaccatttttctacaaaattaagggacctattttgagggttccatggactggccaggaaatctgccaagaccaaagcagtcccctaattctctaagtttcactcatgggccacctgctgtcactgttggcagctgcctgtccacccaagcttgcaaatgacgcatcctggatggcctttctaatatttatccgcattgtacaaaaccactgttgactgccactttctcttggaatcatcttgctcatattcttgagacaggttactctggccattcaaggatgggtggtgcctcagctttgggactgggtaggtccctctgggagcagaggctgtgggcagcaggttccctcaggtgggccgtgggcaggtggtatcctgaggctgcgttgcctcctgttgatggagtctgttgatggaagtgtagtgacaggcacaaggaaggcttctcagtactctgcctatgctaatcaggccacatcctaactttatattcaatgcttggtcccaaaatcaagagggagctgacagaagacaatgttcagacctctccagagaggtcttctcgtggaagtcattgaagaaactggaggtgttttatctggaaatgagatgacggtaggataaaagagacccctgtttttaatagttcatttgttgcaatgggagattggccttgggaggtgttcaagatgattttctgcggtgctgggacctaagagaaataacatggaaacacgtcatgcagaagttagccccttgccagttctctttccatcggttctgttctagtcctcaaggcttctctattacctgcttacctgcctctttaaaaacaagaatgcaggccctgggctcttccacaggcaaaagtgtttgactttcatatcattcatattgttgattttttgcagttgtcttctatgtgtggcaagtaacacaattcagtgttttctatttacattaatggtatgatatttattttggaataattttaattaaattaagaaaacaagccgggcatggtggctcacgcctgtaatcccagcactttgggaggccagggtgggcagatcacgaggtcaggaggtcgagaccatcctggctaacacagtgaaaccctgtctctactaaaaatacaaaaattagctgggtgtggtggcgggcacctgtagtcccagctgctcgggaggctgaggcaggagaatcacttgaacctgggaggcagaggttgcagtgagctgagatcacaccactgcactccagcctgggtgacagagcgagactccgtctcaaaaaaaaaaggaagaaaaagaaaacattaagtaaatcatggtatgagtggtttatagatatgctgaaacttatggagaagtcaagaaaacaattgggcattggaaacaccagtgcagattgttatgtattgcaaagtagggtaaatggtatcacttgcatgtggcatgtcagaggcagccggcagggcagaagttctcacaatagatggagcttcgcaacatgggatgtgttcttacctgtgagcttctggttgagtcagggaggcgtaggaagacatcatttttcaagaatgctgcagcaggggtcctgcatgcctctggatggtccctaaggctcagcgtctttgccagtggcaatcagggcaagtcctcctttggccatacaccttccccctcttcactcctctctctgatcttaggagagactcgaaaaggtataaaggaacaccaagaggccttcttaagctcaaggaatcaacagtttgtttattttcagttccccatgtattttgaggctggaggataatgcaggcagccagactacctgtaccttacctcttgggagccaaagctatgaggcagctgtagggagaatgagtaatggatcagcaaagaggcaggcaccgttggctctggaacagctaaagtctcgtgggtgggtgtgggggtcatggcagtgcattgaaatggagaaaccaaagatgttccattcccaatgcttctgttttcctgcactttcccattgcttccctacacctgtctgtgtagaacaataaccatgaatgtcattataaactagaaagtatggctggttacggaagtctagtcagtgcctcactgtcgctgactcagtccaacacccaccatctctggtgggacaagtctgcactttggttctgatttcctctttgaggtctagatgccagttttcagcaactaccaaacagtttttcttggctgagcctcttcaacacgtgcacttatgggtcagcttattttattgttgctttgacttaagatttccatggaatatgaacatgaaaagagagtctttttgtcaaacactgggagacatttcacatattacggccctgagtacgttcagagttaccttctttgaataaaatcgcctttccctggggcccacgatgagcagtgggagagtacatacggatagatgagaaaagatttttctctatgtcaatcttgaaaccttctttgagtttatgtttctttgtttgtttttctccctagttacttgtgttttaagttgttgaaggcaagtgatctggttggacagttattttgcttagaggacatgctaaatcgtgggacaaaatccaatatcagattttgaaaccggggcattactattttatattggcagaattgactgagcatacaaattataaattgcaagcataaaccaagaaattgtaataataatacacacagcttcttttctatcaggttggtccagatcaataaccacaaaccatttatcccagacaatgttcttacccgagccctgatggtctcattcataacacctgtaagtaagccatccaccttttgtccccttatcactttattctgagcagtcaccatctcagatgcaccacctttttaatgtgaccttggggagaacacactgggcttcctgtgttgccagagtcccaaagtcatcctctaccttgaacgcttttattttaaaataatagtgccactcatttgggaaggttaacttggactccagcttataaggattgtccagcaaagaaacgaaagggtagaggaacagctaatgctcctgtggctcatggcttcccagatctgcagggagtgcctttccagccagagatgtctagcctcttgcccccacaaattaggaggaagcagataaaagccttgcacgtaatgtgtagcaaaaatgcaaatatttggatggaaaagatatacgggaacgtcagcatagatgctacctcgggggacagagaaagagaaagaagagaagaaagacggaagaaactgggataagagaatcgcaagatctttatgtctgtaacctttgctttttacaaatttgaagcaaaaatgccccccgaaatcagcattaaatctaagatgtggatatgtgagtcctgattacattagtctttgtattttctgtgttttggaacaatttcattacatatgtgtatgtacacatacgtgtatatgcatgtgtatatgtccatctaaaataatcaaaatgcttaggatccagttaagtaattcattcaagggctgcatgggagtggccattcagagatacgcagacaccaaagaatgatgaatttctgatattccaagaatccagtgaaatattacggtgtggggaaaagtgaagatcttttatggaggcaaaagggaggcgctgaacagaatcacggtgttttccatacaacggctaacacacagatgtaagatttgattggctactgttgacttcactctaagggggttgcttagcattttattataaagagataacaatgaccaaggtccctacctcccacatcattcagtctggtttgaatgaaggctataagtctggttaaggtctaagatctcaacacaaaaatcaggaagcagtggtcacgcaccagagagaaaaaacagcctgctctcacaactccatttccagggcttaactttcctctaggcctgtgaaatttggaaggtcctgaaattttcttttgtttttacatatatgtatgtatgtgtttaaaagaaaaaggaggccagccacggtggctcatacctgtaatcccagcacattgggaggccgaggcgggctgatcatgaggtcaggagatcgagaccatcctagcttacacggtgaaacgctgtgtctactaaaaatacaaaaaattagccaggcatggtggtgcatgcctgtagtcccagctactcgggaggctgaggcaggagcatcgcttgaacccgggaggcggaggttgcagtgagctgagatcactccactgcactccagcctgggcgacagagagagactccatctcaaggaaaggaaggaaagaaaggatggcagaggaatatgggagattattctccaacttgtcttctttacagggggccttttctaaacttaaaccaatacacagaagaaaagttatttataactaaatcaaaatgtaaattcatttctaatgagttcagttctgaaaaggtttggggaattctgctgttaggagtttcgaagtgaattttagggtttagccgcgggaaaccctagattgagcatgtcagagagaaccgaagaatttagacacgcaggaaaagctggtcaatgaacagcagcccattctctgagtgaaaaagcagctttcggttaacttcacagggggacttaactgtcctagtagcaggaaagatgttgctatagtaacgctcagtgtggggtgagaaggaaaatgggattaaaaaaggatattttccttgtattgacttctttccttaaagatcattaagaagtcacctacccatagctaacagaaaagaaatcctatttagccttaagggggaaaaaaagcccactttttcacctgggaaggataggagctgctcccatgtcctggggtacagagtagcttttaactgaatgtagggatatttggttgagggagtggctgttgtccttttctatgtatacagcagaaaaatgggttgatggatggaattaaatggcaatttaaagaaatccaaagagctgtctgttctgcagttgccacctcccacgtgaacctccctcattcctggctccatattcctagtgtgggaggatggttataaattagatgaggatgaattgtttcgtttgtgcagagctttaatttgatagaaaggggaggtctaataaatcatgggtagaaaagaggctgcatttagtttcaatcttaaagtacagttcaggttaacaaggttaaaaatagattgctccaggaacaggtatgaattcctccatgacgctcagccatcacaaacatcctactccttttatgcttctacacaaagtcagatctggctcagacgccaggcttcagggcaccagagtctgcatctggtagcggggagggcctttcccctcccacagctgcataggtcccaagccaggcccctttgggtctcagtgtctgctggcatctcccagttcctctaagtcacacttggacctcgaaacctccccaaaggcctacaagcatggtgctccctgctcagccccaggcagcctccaagcctcccttcccaaagggagaaatcagagaaatcccttctccaatttttttgttttgttctgagataagatctctctctgttgccaaggctggagtgcagtgatacaatcctagcttactgtggcctcgacctccccaggctcagatgatcctcccaccaccccaccaccaccccatgctccagatacctgggaccataggcatgtgccaccacacccagctaagttttatattttttatagagacagggtttcaccatgttgcccaggctggtctcaaactcctgggctcaaacagtttgcctctcctctttgtttatgctgctgccctctctgctctggtccctatccccgccactccatctccccacaggaggctttccagaactaaggcctctgaactctccgggcaaaggaaaccaccaccctgcaaggctgtcgatagggaagggaagggaagggaagggaagggaagggaagggaaaccccttgtattctttgctggcggccaatagcaggaaagtgggcccagctcatcactctgtgcagtcacctggccccgcacgtgaagggagaccatgcactctgccctgtgacacgcagacctggtgcggggcagctggcctctatcatgctgcaccgatcccattcagctgcagcacgggtggatgatacaggtggcctctttctcctgctgccctgtcagacgctgggatggcagccagctgacacttcgatgccttgaagtccaggaaaagagtcacagtcatcttccttcaagcttggagaaaggacagtcttcccttattccactcagaggtgtccatgtgtaggagaaaggggagggtgggcctcagctctcagctcctctgatcaatctacgctgcttgactcggtggccaggggcaccactgagcccctcatgagcccccagcaactgcattccagcccaagtggccctcctcccctgggtcagtgccgagcaccagcaggtcacatgcggtctatgttttacagtcctgtctttgtggtcaggcagcctctaagtggccgtcagaaagttgagccccctctccccgttcctgtctgactgctgtacactcgtgcagggggagctgtgtcagcgccgcggctttggagaggctgagcacgtcaagttcaagaattatgggttttaggcagatgtgccagccctggcatctggtccctgaagcccagtctactcttggaatccagagtaaaatgtaggcaggggttggttacctagagattaaaaaaacaaaaaaagatattgtgccaaatgccctttttagaaaagaccatgctaaggataaatgaaaatgaagactggagaggtactggctttttttaaaaataaataactattacataccttagcaaaacaggaataaatctattaaactgataacaaatacctctggccaaaaccacgggaaggcttttttcaaagcatttgaaatgcaaaataaacgacatgtaaagattctgtccgtacagcatgtcaagagtgccgtttcattcatcaaggggaacaaatgtttccaccgccacgcggtagcgctcgtgcaaagctcgctgttactcaggagccctcgctacccgcagacaggctgagcacagtgaattagcctctcaggaggaactcagcttttcagagcacaacctcaccacgtcaattaatatttgctgactgaatgcctgctctgcgtctcccactaaccaggggctgcagggacttcttggagcatggcaagcaccccaagcgctagtttagtctaaatggaaaaagcatgcatggaaatggaaatgccggagtaaattcatgagatctaatgaccttgaggacttcacacagacatacacattcctggaggaaggtggtggggatgctttggctaaacccattacagagcacattctgttcatcagagaatgtgtctttaaggaagagaatctcaatcgtttgctaaataggaaagacaagttgacagatgattgggagcctcttccaggcaagaggatttccttaggaagctcactcagccaggcccatcccatgaagctgccctgggatgggtcctggagaagtggtatctgcagctcccacccgctgggcctggcctggccgattcccagtcccccagtccaggagccagaagctccagagctcaccggccccacccagcctcccacacttttgctctttgtctgcctaaggcctaagcctggcgcctcctagttagttcgtgcacactgaatcgaatttcatgtaaattaaatgctaacaggctgctgatgccagcatctctacctttgtcatttaaagtcacaggctccttaatgactgcaattaggcagctccgttattacttgagctagagacgtttagagaggcatctgtgatggcaaaatgctcagcgtgctccactctttccattaaccccttggctctgcctaccggggcatcagtttaggcaggagtaatattagcagctgaagcacacttgtttctaccaaaggtaaaactgactgaactaatgactgcggaggatttctttctctttttttctttttttttaaatggttatgaccatttaaaaaaactgattgttcttataaattgcagtatgtactgtccactctgggttatctatttaccattaataatttatatggtgtgatttgtaaaactactgtcaggcttctttccttacaatgttacaaagtctgtgcgacaatgaacttatcttccagcgggcattgcgtgagtacctctcaggctcccacaccctgtggcgcttcgtggtaccatcaaactcctgcgcttgatttaggcaatgcacgccagttcccccgccccatgcagggcatgtggtaagtcacagtgacatagtataagaccacgcgtgttggaggaacttcactccctgattttttttttttttttttgagacggagtcttgctctgtcacccaggctggagtgcagtggtataatcttggctcactgcaacctctgcctcccaggttcaagcaattctcctgcctcagcctcccaagtagctgggattacaggcatgcaccaccaccacacccagctaattttgtatttttagtagagatggggtttttccatgttggtcaggctggcctcgaactcccgacctcaggtgatccacccgccttggcctcccaaagtgctggtattacaagcatgagccaccgcgcccggcctcgctccctgattctaatccctactcattttcttcacctcgagcaggtcagttaacctctcagagccccgatttcctcatctgtgcactggggagaatggcttgcctgaggagcagcgtggacacattggcagtaagtgagagggtttatgttaaactgctgacagatagtgatataaatgttatgtttagttgttacgatgtccaaaatgaaagggaagagaacctctcttttgcttcctggcagaggctctcggtaagctgttcgtctccacggctgcattctagcaacttcgttgaaaagcattcatgggtgttggtgtgtaagcggggccccgaaggaacagctaaattccaagccaccttcagctgggagtccagcccgtccagtccaagacagcgaaggccacccttggtccaggtcgccaccttagatacaagcagtgctgcccttccgcttggtggtgcggaacggcacgctattcagtgccttcttgtactcgcccactaaggagaaggtcatgtgaattatccaaaagatgaagcccgagattttaaaatcatactgagtaatggttctgaataaaagccatttgttatgatcactaaagtaaacctgtttgtggacagtaagaatagtgtcttaaatctagccttcaagattaaggactttaaactcatttcatggtgtattttttgtgctaatcattttatgtttttacttatcgtaggaggtggaaagccccttcaatggctctgtactgacttttgaagtggagaaataattctccttcaatttcagagaaattgaagtttacttaaagatgattaaaaatctttctgacagactttgagaaggtctctcttctgactgctgtaattttaaataattcagagccagcttggcacatgtatgtttattaaagtagggatgaaaataaaactcactcgtgtggctgcattagcccactgaacagtatttcatcttacatcgtctctataacttctgaagtgaaaaccagaaactcattggcgatgtcctccctgcttgctgggctgattggcatgaggcagggccagctttatccacttcctgaagaccattcctccatggtagcccctttgccagccgccagacgctcttctcagagactcagaacagcaggccagggatggagggagggaagatgccggatggccgaggagcccccaggcaggtggcagctgcagccttggcccttcctgggaccctgaggcccctgggatgccttggcagcagaacctgtatcagcaggagcagctctgggaactgcggggaagaactggagctctcaggaccccagatcctcagatcctttttttttttttttttttttttttaagagacagagtcttgctctgttgcccaggctggagtgcagtggcatgatctcagctcactgcaacctccacctcccaggttcaagtgattctcctgccttggcctcccgagtagctgggatcacaggcacgtgccaccacgcccagcaaatttttgtatttttagtagatacggggtttcaccacgttggccaggctggtttcaaactcctgacctcaagtgatccgcccgccttggcctcccaaagtgctgggattgtaggcatgaaccaccgcacctggacaggaccccagactctttctgtagctcacaaatcaacaaaattagtaagtatgtgaactgtgatgcagagcttccaaccacatcccaaactgccatggactgcgcttctcttcacgctcgagcagtgatggctgagcaccatgcttctccgcagagctgagctgctctttcttgctcctcaccaggttctctcctgctcctcctgcggtggccacagctttggctgtgctgtgttttgtgccgcagataggccctttctgactttatttgactaaccccccagaacccctgatggtgtttagctggccaaaattcaaaaatccctctgagatgcttgtagttcagaacatttttgttaggaaaatcctctctctctttaccaatgagattttgcaagaacaatcccatctttctctttgtctttcagctgacattttagtcttaaattttctagggacaccttcagttcagcctcttatcacattagactcttatttgtattctggagagatgctggtctttaatattctcgaagacaaataaagaaccctcagaaaacccagggccattctactttctaccttcagtcctgaatgatgtcagggagctctcaggaccttcaggtggcattggaaatatctcttgggtttggaaagggcaatttagatccaagcaatctcagaatgcatttgtgatagatatgttatgaatttttactgcctcacctcttcacttcctccctgtctgcgaggtagaactaggattttcttatccatttccagcaactcccagacccctggtgagggaaccctctgtgtctgccgaccatgtctttgcagaacaattcaatctatcccgagaggcagcctcccagaggcagcaatggggaaatgccaggcttctcaacctccgtgtcagcattcttgatatttggggtgggataatcctttgtcagggggactgttctttgcattgtaggatgtttagcagagtctctggcctctgtctgctagacaccagtggcactctgtagtgtgacagtgaaaaatgtctccagacattgtcaactgagaacttctgacataatgggaagggtaaaaacttagggccaggccaggcgcagtgtctcacacctgtaatcccagcactttgggaggccgagacgggcggatcacgaggtcaggagatggagagcatcctggctaacacggtgaaaccccgtctctactaaaaataccaaaaaaaattagccgggcgtggtggtgggcgcctgtagtcccagctactcaggaggctgaggcaggagagtagcatgaacccgggaggtggagcttgcagtgagccgagatcgcgccactgcactccagcctgggcggcagagtgagactccgtcaaaaaaaaaaaacaaaaaacaaaacaaaacaaaaaacaaaaaaacctaggcccaaaatactgatgctcgaatctcagctctactgggacgaccttgaccaagtctatctgagctcatagtacctgccccacgagattgcttgcataattaaactcaatgatgtggtagctttcagtacatgtttattgaagccaaatctcttatcatctgttttcttaattaatggcaagaattacgttcagatgcgcagtaagcaataaaaaaaaatctagcttccttgtttcaccaaaggtacacttctagctctttggcacaaaccggtttagttcagtgtagatggaatcgctcggagatctggcttcatcacgggagagaggacatttcacttctggtggtatctctcttgtacccgttgagagctgctcccacgcagttaatggcgcccagataattacagacggagctgccttcgggttgtaaacagagctttgggtgattgcacactgccatttatccggcctatttgcattcgtacttatttgcatttctacatctcccacagctgacacttgttttttcattttgtgattccaaagcacttttctgattaccctgtgcctgctaggagtgctccccatcaggcgagggatgcagcctccttcccggctctgccctcttgatttcctccatgtttttggagggaggccagttgttgggagaccgcatctgccgtgagcccgggactaatgagtcattgttcttctgagaagcccgttggcgtcagcttcctttcagctgcggcatcgcaggaccttgtctgccttttcctccgggttacacctgggacctgctgcattatgttactatgacaagggtcaccttactttctcttttcgaaagtgagattgactttccttctgtttctgaaagaaatgcgacttaaaatttgagtctgtagcaatcagcttgagatagcctactctgaaactgctaaaagaacagtttccatttaagaatttagctgcagtgctgagaacatacaacccctacctttttaagcctctcatgtgcttatatttcttaaacaaaatggctatgtctattccttgctttcagtaaaaggcatactcgtcagtttaataaaatgtatgttaattttcctaagccaatttacaagcagcattggtcaaatagctacatgcgggatgatcacccgaatatctaataatgatagagcacttaacggtttactaattccttaacaacatccatcatctatttttcgattttcttctctctctcggtttccacatgacccatgcattgaaagatttagatttcctatttcgccgaattgtactgttttcccttcccttctgagtgaaagtaagaaaacctatgagtttaaagtatgtcttctgccctacatgctgtatgtaaaatttaacagaattcagccgggcgcagtggctgatgcctgtaatcccagcaccttgggaggctaaggtgggcggattacgaggtcaagagacagagaccatcttggccaacatggtgaaaccccatctctactaaaaatacaaaaaatagctgggcgtggtggtgtgtgcctgtagttctagctcctcaggaggctgaggcaggagaatcacttgaacccaggaggcggaggttgcagtgagtcgagatcacgccattgcaatccagcctggagacagagcaagactctgtctcaaaaaaaaaaaaaaaaaaaaattaacagaattctccctgtaagtgaatttgtaagaaaacaagaacattgactattccatttaataacaaaacttctgggacagaccagctccctcagtggattagttaaatgatgtgcagattatattaacccatggaatatagcatcacggacccacataccatcatcctgacttagtacgactcacaccagctctgtatttaaacggatgaggatagatgtgggctcatataattactgtgtcaattacaagggaagaataaacaaatgtttaccaatcaagtagtcaccagcaacctgcctttggtagatatactagtgttcctatttggggaaaggtattatttattttaatagttgcataatggtcactttcaaaatatgcctttgactacgttatgcttattttctgcatgtcacagactagccctgcttaggtgagcttagtagatacactaatgttactactttgagaaaggcattatttaatattcctttcaggaacacattaatatacgatgtcagaattatgatgcttggtttttatacacagcctgtcccagctcaggtgaggtcacatcccttggccatacctgtgtaaaaagccaaagggggccccttttccagacagcaaccagcctagcccaggctcccctgccttgtggcatccacgccaccagtcactgccaaagcgcatacaggagtccccgcttatccatggtttcgattcctgcagtctctggtactcacagtcaaccgaggcccgaagatattaaatggaaaataccagctcaacacttcctaagttttaaattgctcactgttctgagttgtgcgatgaaatctcacaccctcccacctggatgtggatcctccctttgtctggcatctccacgctgtagacaccacgcgcccagaagtcacttagtagccatctgggatagcagagctatagatcacaagaagaaggatgagcgcaggacaatgagatatttagagagagcgggagtccacattcacgtagcttgtgtcgtggtcctcgcaccattatacctgctctgctgtagcactgttgtgaatgtcttactttgcttaatttataagttaagcttcgtaataggcatgtatgtgtaggaaaaaacagcatatatagggtcggtactacccgtgatttcagcatacactgagggtctgggaacgtatcccccttggataatgggggtgactgtgatggtaacagaagcatcctagttgttattttcataggcactgctaccaagcttgtaaacctcttcactgtacccagtagtgagacagagctgcagagggtgaccggtctccctaagtgaataccaggtggaacctaacacatagagagagaggaaaggccaatttcagacactgaaagctactcttacagatacagacatttcaatagccaggagaccctgaggaatggctcttaatccaggtggcctgtgtatagacatgcctgcaagtagccaaccaggataataagagtcatcccccggaagggatgaggtcagagcaggagtttcaatttgacccacgttcccatcatgcctttctctctttctctcccatcctcacttccaaatcacagccattcacccaagcagttcatgaatgcaggaacctaccaggacattacaaatcattaaaaatttaaccctcccagggagcaattacaactccaaaaaggcattatttgcactctccgcccacccccccccaaaaaagtcttgagtttgcagagagtggccaaaaacattctagaacttcatgtctctatgccatgcctcctcttccatcccagcgaatgaaatccacctgatgagggcacacagcaggccctcccatcccgcctcctcctctctgccctcccatcccggcccctgctctctgtccctcccattccactcccctgctctctgccctcacatcttgccccctcttctctgccctcccatcccaccctctgctctctgccctcccatcctgccccctgctctctgccctcccatctcgccccctcctctctgccctcccatcccagcctctgctctctgtctctcccatcctcctcccctgctctctgctctcccattctgcctcttcatctctgccctcccatcccaccccctcctctctgtcctcccatccctccccctcctctctgccctcccatccctccccctcctctctgccctcccatccctccccctcctctctgccctcccatcccacccccctgctctctgtcttcccccactccctcctccccaagtcattgctgggaggagtgggtcggcctcagggcctcccaggcagtccttgaggaaaccacacacttcatgaggaaaggaaatcctggaggagttttcatgtagatacaggttttatttagggaaaaaaaaatccagaaataaatacaactgcctggaaaactaactatattttacattttggaataatttaaatatcattcctggtaaaggaagtgatgcagaaaagtcaagagagctctgaaggcagagagagctggataagcgggtcctgattcatcagtgaccttgagctggcccctgacacctctgaaattccatttctgcaatggtaaaacggggatagcaatgacacctacattattatatttaaaatgaacacattttatttttttaatgcgccaatatttgtaaatattcataaagctcatatgaatatttgtaaagctctctgcacaaagtagaagctcagtgcttctttataaacaacattaacaaaacgacttcacttaccttcacacgatccctttgcattagggattatcgccaaccaggcaggaggcgtcagagcatggcttgataaaaatagagtacaactatgcagggagttttttaggacaatgggaatgtaaccgcttataatgcatgtccaaaaggttccttgtaaaatattatcttgcaaaatgattttagagtgaaatcatctctcttttttctggcaaatctttgaattccacccaatttaccttcattatatccagctgcacaaaagcccatgtgttatttcttcccatgctgtctcaccagatctgtctgttcacattaacctagttaccagtggaacaaaaatgcaattggccaaaggttacatttctttgtcatgagcacaagagagcaagatcatgccgggcaaaggctttcagtaaatttcagccaagaagttgggcttcttcccaggaactctttaaccctcccctctccttcctcccagaaacacacatgctacgttacccttggtgtttttccgcgccaaacttgtggtctttttttgttttatttttaaagatgaatatattacagaaagaaatgatactgaatttccttcagcatgccccccaattttaggaccttgaagattttcatgtttcaaattgcgttaaacttttcaaagagctttctttccctgcttcagctataatcctgaagagacaggtgaaagatgctttgtaaatcctcattttacaaatgagaaaattaaggctccaggagatgatatgacttgctcagcgattacacaagtaggaaaataaagaccccattgtgtgttgattctcaaacggtctgcattatagtcttgtgtctacacaagtcagcgcacaccccagccttggagaggatgttgttctgaggaatcggagtccagttcctgaagcttgggcggctctggcttcatgaagacggagtctgggtgcaaagcagaaacttagggaaattccccaacagccggcaggcagatgccaccctccctcaccctgcaccgtagacgttagcctgggataatggcagaggaaaaaagcacacagaaaactttaagcagacacagaaataagtaatcattttccctatgatctatggcaatgttgaactcttccaagagcatactggcaaaatctcttgagtaaaatagcaagtgaatagaatgcttactattggaatggtatggagtggtggtcttcaaactgttttcctaataatatattccccacatacaaaattttgaaaacaatgtacctcctcacaagtgtttaagtccatcataaaattttacccaggcttaagtagtagcaaaaagtgaaactcctggagtgttataaaaactgacaatttttttttaatggagtttcgctcttgtcacccaggctggaatgcaatggcgtgatctcaactcactgcaacctctgcctcccgggttcagataattctcctctctcagcctcccgagtagctgggattacagacgtgtgccaccacgcctggctaatttttgtatttttagcagagatggggtttcatcatgttggccaggcgggtcttgaactcctgacctcaggtgatctgcttgcctcggcctcccaaagtgctgggattacaggtgacagccacagtgctcagcctaatactgacaaatattttataaaagaagagagacagcaatcttttaaatgacagaaatagaatctgtacaccagagggtccacatcattcattttgtaaacacatgaatgggctcttctttatcaaagggagtttatatcgggcctcatactcctagtagtccatttcacttctcttattctctaacatgtgtttatatttgaaaatattttattggtcatccagtatatatttctgtaatgaaaatatgtacaaagcctttaatttttaatttctagaattaaaaacgaggttctgaggttaacattttttcctacttgagttattaaaattaattattagtagtaaacagttaatccaaacaacaaaaatacattataagttttgttgactacttgttaaacaaaaagtgaaatggtaatgggaacatccaacttactgagatgccgcggacgcatactgcttacagctggaatcagacagccctcaatatgaatttcttccatttttcattttaattaatgtaagcactaaataactttgttcatataaataggtacattgcaatggaagaagtcttttagcagtatcattctattttttaaaagtcatttgcagttatatgccaaaatcacatgatagtctatcatcaaaacatatttttatttttcaaaatcttcaggaacaaagaattagaagcaaaagtattttttgccctttgccatgaaattattggcacgctgatttaccttttcagttttttagaagtatgccataaaggttttatgaggatcttacgaataactattaattgtaccttttattttgtgcatttagaaacccttcatttaatacattcagaaagagttgaaaaaatattaaatattgttattttcaatacgcctttgccagtaaagcatctcttgataaaatatttttgtcatgtgctttaaatatattcttacccaaatggaagttgctgagtcatttaatttatagaaaaggtaaaatatttaacaaactcagtcttcacaccaatagctaaaatcagaggctaggtgcagtggctcatgtctgtaatcccagcactttgggaggccgaggtgggcagattgctggaggtcaggagttagagaccagcctggccaacatggtgaaaccccatctctactaaaaatacaaaaaaaaaaaaaaaaaaaaattagctgggcatggtgatggcgggcgcctgtaatcccagctacttgggaggctgaggcaggagaatcgcttgaacccgggaggcagaggttgcagtgagccaagatggcgccattaaactccagcctggatgacaagagtgagacttcgtctcaaaaaaaaaaaaaaaaaaaaaaaatcagaggaagtgaatattgttaatgtaaaaatatgctaacatgtgttccaaggaatattgttgggggtcactaaaaagtagatatctatcttgcaagatgagttatgaaaaacagtcaggatcagaatgacatagaatattcatttaaccatttcacaaagtttaacaaactaaaataaatctatctgttcttgtacttgatttgtaataaaggaatattatgtgttgctgaaattacagttatttatgaagcaaggatagcctggagtcctttggtgggtacacatgtgtgcatgcattaaaatgcaccccagtgtttggcatctgtgaataattaagtaagagtcatgtaataaagagaaataactttattcatgatcaaacattgtcaagaaagtgaaaagcttaaacgtagatatagctatagatagaaaatattattgccggatgcagtggctcacgcctgtaatcccatcactttgggaggctaaggcgggtgtggattgcctgaggtcaggagtttgagaccagcctggccaatatggtgaaaccctgtctctactaaaaatacaaaaattagcggggtgtggtggcaggcgcctgtaatcccagctactcgggaggctgagccaggagaatctcttgaacccgggaggcggaggttgcagtgagccaagatcgcgccattgcactccagcctgggcaatggagcaagactccatctcaaaaaaaaagaaaaagaaaaagaaaagaaaagaaagaaagaaagaaaagaaaatattctgactcagcagctagcaaacaattttaatttgttgttaataagaggtggaaaatattaaacactttataatataaaatatgagtattgattgcactgggaataaacattttatgatatgatttaataaaacaggttttaactaccttgttaaataatgtgtaccacatctaaaaggaaccacataaaatgtttatctgctgatttgatctagtattaaatttaaaaatttcgtagttcctaaaaacatttgttatgtttgaaagactatttaatttatagaaaaagccatttcttcagtggctcaaggtttatttctttccagttaatgatatactctacaaataagcattgagattagctaatcataattgctcacattaaatacatgggaaaacgtagattttagcagtcaatatttcttttttttttttttgagacagagtctcgctctgttgcccaggctgaagtgcagtggagtgatctcgactcgtttcaacctccgccccccaggttcaagcaattctcctgtctcaacctcctgagtagctgggcttacaggcatgcaccactgtgccgtgctaattttttttgtagttttagtagagacagggtttcaccacgttggccaggctggtctcgaacttctgacctcaggtgatccgcctgccttgacctcccaaagtgctgggattacaggcatgagccaccgcacctggccagcattcagtatttcttttttttttttttttttttttttgagacggagtctggctgtgttgcccaggctggagtgcagtggcgcaatcttggctcactgcaagctccgcctcccaggttcacgccattctcctgcctcagcctcccgagtagctgggactacaggcgcccgccactatgccgggctaattttttgtatttttagtagagacagggtttcactgtgttagccaggatggtcttgatctcctgacctcgtgatccacccgcctcggccccccaaagtgcttggattacaggcgtgagccaccacgcccggcccattcagtatttcttatccattctctctgtgtttgctctcaccacatttttccccaagagcagtgcatttactgacaatcccaagagagaacaggttaagcaattaaacagaagttggtgaaaattgctatcattctgctgtggtttcactgttctctccaaaactcatgttgaacttcaattgtcagtgtaatagtgttaagaggtgggacctttaggcagtgattaggtcctaaggactctaccctcatggatggattaatgccctgtgtttcataacatagttacaataataatcgtacagtgaacagccttggaagatagagatactgtctctttccgcagcagaggggaagtttgcttataacaaagacaatgtctccctctgttgacaatggcagtcctgctcacggcccattataaaagactcagattccctaaagtcagggtcctcacacctgtaatgcaacccatgccatgtgcagctgccatctggtccatttcaaaccaccctgtgagaactgggatttgagaaaccagcacaggaaaaaagatattgctgtaaataatgcatggtcctttgtctctgacccaggaacctctggtcttctcctggcctccgtaaaactgagcagactaacttgttagcttgcaaagaaagcaaaatcttggatccttcacagttcctgacaagaattaaaatgaagtcttctcttggtagctacctggagccatgaatatttccaggtatccaagtggccatactcacttaggagtattctgaattactgaagaaaaggcccattaatgactctgaaactcaccctcctcccacacaccctcggactggaacttctggattcctctttcttcattgatctacttgtggcccaaacctgaaaccagcagccatctccgtggcctccctggccctcccgcttcacatccaggttcttctagttccatctcagaatgttttctgagctctggaacttgcttccatttccttcttctagcaacatcctagccattgcaaggtctcagctctggggataccaccctgcctcaccacattcgtgttatttctccgtccctcttaaccatggctccccaggttgcctgttttcccacacatagagcaatagcacttagggcactgctgtgttataatgacctgtttacttgcccatgactgactataagctccctgagggcaggaactttctcaatcttgtttaccattgtattccacacctagcccagcacctagcatgtctcagcacttgatcagtatttgctgggtaaatctataaatgaataaatgagtaaatgagcaagaatatataaattgtatcttacatcatatgaagtgtgatataggtgataggagcattcactctgaaggaaaggtgaatatctcaaggcacaatcaaggttagcaaaggtgccatctgcaggtgtcctgtctaagagaagtttagcttcaggaacatcttacgttatctcttggacatgagcaaaactttcccccttcttgaaccagctgacctgagctggtctgccagccttccagtcttagggcaggaatgtatgcctggccatcaggaagaaggtgggagaaaccagggacccctagccataggtcagcacatgatagaggcctgcttgaaacactggcagggtggccatgtaggacttacacagtcatctgcctgcaaaaacatgacttgaaatacatgaatgcttgcccatatatgacaagatggaggttttccaaggtagaggtactcaggcagaaaaatgaaagaaaaaaaatgtgaatgtgctttttttggttgtgagctttattatatgtgtgaattgctgattctttagcaagacagtagcagttgacaaagaatcgcccttcagatgtgtggaaaaacactcagagaacacagcaaaccgccaaacaatcaaaggcagccacaatgccacacacttagagatgcaagaaggtgccacggcctttatggctgctgccctgggcacgggcatctgcgatgccagccaggttcgaagatggacggagcagccgcctgtctctccatgaggctcgtgtggaccctgaagctcacagactccggcggatggcaggcttctgtctgcactctccaccccagcagcccgtcctgcctccctctgcccctctctgccagtcccagcaggaatctgacaccttataccttcctcaatatcaggtagcagtcaatggaaggaaaaatgctggagtcttttgataaaggattggattcttttaagccagttattaatgtatttcattcagaatgtgagtagaagaaagaagttgccctatgttgccctgagatggaggcgcacggctttgaggaaggcccccacagtgcaagtgccagaagatgcaggtggaagagcatcactcatgcgtgtgagctgtgtccaaatgccgagctccacggagacacactcagactgcagcgagcttccttctgcaaccatgcaagtgtcaccctctgtcgggaccctctgagcccatccccgcaccaaagcttctctccagtgctggaaacctctgttttcaggtatatcgacaagagtgatttcagtctggagtcacgcctggagtcatgactgatttgcttgagaagccagtgcaaatcgctgagccacagcatatggaaatctgcagattgcaagtgaaacgtgggattcatcaaaagcctgattgcgtactcttccatgacacttgatacatgggattatgatgtgactttatctatctatttgaatacttccaacctcagcaaaggcctaaatgtagaacacagtggcagtgaaacaactctaccctcaagaaatatatactttacatccatgtcacaaaacgtcttccaattgtgtttcactttcacatgtcagatttcatgtaatgattgctaattactagcaacccagacaagatatagacttatgaaattgcctcatgagtttagtgatttttcagcaactggaaggaaatagaaaatccttgggtcagttctacctgagttctaatcccagctgtgtcttttacgagctggtgggcttgagtaagttattcaacttttgtgtgcctcagtttcctcctctgaaaaatgtggatgataatagtacctaccagttagggtggctgtgagaattaaaaaagatgattcgcataaagcactagtttagggcccaatagtaacatgtaatatcccagcattttgggaggccaaggcttgagtccaagagttcaagaccagcctgagcaacatggcaaaatcctgtctcgtctaaaaatacaaacaattagctgagtgttgtggtgcatatcagtagtcccagctaccagggaggctgaggtgggaggattgcttgaactggagaggtggaggctgcagtgagctatgatcacgccactgcactcccacatggtggaccagagtaaaaccctgtctcaaaaatataagtaagtaggccaggagtagtggctcacgcctgtaatcccagcactttgggaggctgaggtgggcagatcacaaggtcaggagatcgagaccatcctggctaacatgatgaaaccccatctctactaaaaatacgaaaaaattagccaggcgtggtggcaggtgcctgtagtcccagctactcggaaggctgaggcaggagaatggcatgaacctgggaggcagagcttgcagtgagccgagattgcgccactgcactccagcctgggtgacagagcgagactctgtctcaacaaataaataaataaataactatattagggttctccagagggacagaactaataggaggtgtgtgtgtgtgtgtgtgtgtgtgtgtgtgtaaaggggagtttattaagtagtattaactcacatgatcacaaggtcccacaataggccatctgcaagctgaggagctaggagagccagtctgagtcccaagactgaagaacttggagttcgatgttcaagggccggaagcatccagcacaggagaaagatgtaggctgggaggctaggccagtctagtcttttcatgtttttctgcctgctttatattttagctacactggcagctgattagatggtgtccactcagattaagggtgggtctgccttccccagcccactgactcaaatgttaatctcctttgacaacaccctcacagacatacccatgatcaatactttgcatccttcagtccaatcaagttgacactcagtattaaccatcacaatagcatagaatcatatccctgaggtacttcagcacgcccctttgggtattcaggggcagtgggacatctcattttctctcttgctttttacaaatctccgtttttctctcttcctctttttgttttcctttaaatttgtcaccccatcacattttttgctcctacaacgctgtacacaggcacccccttaaccacttgggaggccatcactcatctttgttaattcccctgaacatccagtgtgggaacactccactgtcactcctgctcggtgttggaactgaggctgggtattagtctctaaaaggaggacaggacagaccactgcacttttcaggaatcctgtgggcccaacatgagctattaaaaaaataccatgtcttccaaggaacaggggcaccgtgtgaatatggggggaattactgatgtggcaaggcgtctcgtctatattatacaacctactgtgttttacaaagcacaaaatttgagtatttggacaaattcatctcctcataatactttacaaacattttgacccaaaagatacttagttgtaatcttgacttccccctgaagacacctctccagtgggtgatgaggcacctttatcatgtctgactggggagtagccaagggggactagtccttgatctggtgcatcagaaatgaaaatctgtggattctgatctcaaaagacaaggacaactgagacatttgagaccagcgttggacaccaatcggaccacggacctacaccatctctccctgaagctcattttgttgcctctgaaataagtcaatggagactctttctgaagggttgctggtagacaggacaaacaagtactgtgaactttcagatcaggattgcaatgggtgcagcgataacctttcaggaggtgcatttttgatgtgttgtaaggcaacgctgtgagtagagaacctcaatgcagtttgtactctttgcccactgctctctaacacgagtcagtagaaagctggtgggctgtacagttcaatctaggagggagtttcagctcttccaagactagtggggtcaaagtagttatatgagcctctcaggatgcagtttcctcctatgttaaagtaagtgtgtgtgagagagaggagacagagaaagagagtcatgcctaactcagcacataggcactcaataaacattgggttctccacaccaattcacagaaacagaagacacctgtaggcatcacttacttaatgtgggcctatgagtactttcttaagtgtttctgaacaaagaaactcccatagtctccctcgacagtacagtccaacttttcagagcacatttaactaggaagttcttcccacatcgtggctgctgtctcttagaattaagatgtaaagacgcttcacattgctgtcacacaccaaaagcccttccaggtactgcagaataaggaacatgcattcctagatgagttaattcctttgatactttgattgctcacagtggttttgcctacatcctctccaaattctccactcctccttttagtacagggagtggccaaagagctataattacactcttaaggacagttagaggtgtcctgtggttcctgctgttaaagtaattaaatggaagcctgctagaccaaggtggccccaatgccctgagttcctgtgtctgcaatctgaaacccaactcagtggtcatgttctaggacaatctgaaacagccagctaagccctaacttgggactttccactgggatgaattctttgccttgcttctgagttcactccataaaagccttcctctttgccccttctgtggagccatgaaccacttgtgatccagagctggcccacccatgattgctgtttgctcaaatcaaaatcaattcttttttttttttttttttttgagacagaatctccctctgtctcccagaccagagtgcagtggtatgatctcggctcactgcaaccactgtctcctgggttcaagtgattctcctgccatggcctcccaagtagctgggattacaggcacccaccatcatgcctagctaatttttgtatttttagtagagacacggttttgccatgttggccaggctggccttgaactcctggactcaaatgatccacccaccttggcctccgaaagtgctgggattacagacatgagccaccatggctggcctcaaatcaactctttaatattaatatgcctcaatttatcttcaacactacatgccgtactccagtctcaataccagccttgtgctttgacattgaccttcattggccagtgcttttcttgtctgtagactttagaaaatcaccagaaacctaatagtaaagatcatattcattcatttaactgatctgtgttcagcactgcctgtaaactgggcactgttctgtcaattcatacacaatgatgagacctaggcagagtcccctccctcttctagacaaatggtggagaaagatgatagtggttgtgtgtagcctatgagaccaggaacaagagcagtggaagggactggtgggacaatgagccatggtaaggccctgctgtagctagagtgtgcagaggaagcttccagaaagaggcagctttaaacagaccagccaattttatgaattccagcttgggattgacaagtcatctaaatctgtaaatgtcttgcttgtcattggccccaaatcaaggaattttaagatgtcctttgtcatccacattccagagcttgacaaacactgcctatgcccctgttcaaatgtgtgttcttcatgcatgaatacgtgcagaaggttcccccataaaattcaggtggttacgacgtgtaactgcatcgcagtactcacctccgaattatttacatgtaagctgcaagttacacagcgtgtctcagctgctatccgtttgcatgtagacacctctatgtacattagaaagcagagagagcatgacaacccttcagatactagttgagaaaaattaacgtgagtgcctccctattcatttgggggccacgtcttctcagatgaggacgtcccaaccaaacccatgcaaggctggcatacattaaagatgctgatatctcacacccagtgcagctgtcaagtctgctctaagagtgctgcagctcctgatgtttcaaggccttctcatagtgcgtgcatttctcactacgatactgacatgtaaatggatttataggaaatataaatgctttctaaaagacacaaataaaatgtctgaatgcatgcccagcttgtctcatattttggtccacatgctgtgagtgatgtggcagtcgatgtcagccctagaaaagggctgctgttggcgtctcgatcattggcatcatccccgtttatttattgaagtctggaatgcaaggtcagggcactgggaaattaccagcctagaagaagtagctttgaaaatatgtcatttgcctctggggcattttttcctttttctctcttccttccttgctccctgcctgcctgccttcctttcttccttccttcttccttttttcctctatttttccttcctattttcctctattcctttcaaattttcttccttcttcataattctttcagcagagaaagggggaataaaaaagaaacaagaaaatgaagcataaacagagcatctatgagaatataggcgttagtcaaagaaagagaggagataggtgtaaagttaattttctcaagattttatttgtgttgtctggccaggcacagtggctcatgcctgtaatcccagcactttgggaggccgaggcaggtggatcacttgaggtcaggagttcaagaccagcctgactaacatggtgaaaccccatctctgctaaaaatacgaaaagtagctgggtgtggtggtgggtgcctgtagtcccagctgcttgggaggctgaagcaggagaaccacttgaactcagaaggcagaggttgcagtgagccgagatcatgccactgcactccagcgtgggcaacagagtgagactccatctcaaaaaaaaaaaaaaaaaaagattttatttgtgtttccttagtcggttattttgggttattactgttttactttcaactggaactaagtagaatccttggctaataagttttatgtggatcctgccacagttatctcaaatgatttcttggagtaaaacttgaaaaatattttcctttactagattatgtttctataatgataactcgttaaacagaaatgctacatagaaatccaaagaacttcagttgttcttttctatcaaaattctttacttctgaaattcactaaattctaacctttttccattatcatagccactctgttgctgaagaatataccaagaatttcttcaacaccactgatagtaaatctctgactatactgaatccagaatttcaagaacgtatttcaaaattttaactttttaaaaaatactttttaaactcttcatgtgatttcttctgtgtagaccctgcacaaaagttcttcttatgctaactttatactatccttaatttttccctaaatatctaatgtagtctctttagaataatatacaacagccagggttggaaacagttcaaggggtaaacgtctctatctgaacaaactcttcctgtgatctccggagtcccctccattcccccgttaatgctacatggggaaaggaagttatgctgtaactacagaagatacaacatactctctatccaccctcatgctggtcctgcttaatttttagtgaagatcaaatgtgatttctgcatgaactcaggacattggttctgacccagaaagtaaactccaggcctaactgccaaatacccaactcccttctaaccacttttctacaacttttggatggaaattctatatctactcattaattgtctagaaaggactgatttttgccattcaaagtcacctgagaatttccatttatgttgggaattcagcacgtttcaattaatacttaagtacccccactcaagcatcaattcaaaatcaagatgaggaatgcctcaactctcctggtgtggggtatgggccctcgagtgcctggagggtaaaggctcacccaggtgaacttcacatgattttcttacatcatcactcaaaggcataaggaccaggaggatccttcctttctctacttagtttattgctttctctcttgctgtccttttgtgctccctgtctccaatggttcacatacaaaattaggggttagcaaggaataggaatttcagagaagcaagctctgtggagttgaggaaaaccacaaatattgtagcacatgatttagtacggcaaatggaaaaaacaagatccagcagcccggcaaattctctcttcagctatgtgaccttggacatgtaacttcatctttgagctttcttcatttgtaaaatcaggatcttaatttttaaaaagtaaagaaaactgaggctgatgtgggggggaaatcactggagcccagaagtttgaaaccagactgggcaacatagggagaccctctctctacaaataatacaaaaattagccaggcatggtggcgcgtgcctgtggtcccagctcaggacgctgaggtgggaggatcaccgagcccagaaagtggaggctgcagtgagatgttattgtaccattgcactcccgcctgggtgacagagcagaatcctgtctcaaaaataaataaagaaagaaaaaaaagaaaataaaggaaactgttcatcatgccaaaagcccatgagccatgcctggcaccaacagttggcatctctgttcatatatagtcattttatccagataaactgaggccactccagcccttgcacctttgaaaactgcttaagactaactcctgacctctcataacgcatttcagaaaagaatgctttattgcatattcattactcttaatttatttcaaaaatcagggttttttactttatcaagttctttttttttttttttttgagacatagtctcgctctgtcgctctggctggagtgcagcggcgcatgatctcggctcactgcaacctctgtctcctgggttcaagcaattctcctgtctcagcctctcaagtagctgggactacaggcacgtgctaccacacccagctaattttttgtatttttagtagagacggggtttcaccgtgttagccaggatggtcttgatctcttgacctcgtgatccgccctcctcagcctcccaaagtgctgggattacaggcgtgagccaccacgcccagccttatcaagttcttaaacaagtgccttttacgtgccaggcgcagtgctaggaactttcttaaacacggtatttgaatctctacagcaatcccacaagtaggtaccaatttccccctttcacagtgaaataaatggaaattcagagatggtaagtgaactactcagagccactatcagtcggaagtaggaggactagaactgaactccggcctggctagaattattcaacacaagcagaatctaattatttcccttacaaaagtcagaggaggctgggcgtggtggttcatgcctgtaatcccagcactttgggaggcagaggtgggcagatcacttgaggtcaggagtttgagaccagcctggtcaacatggtgaaaccccgttttttaaaaaaatacaaaaattagccaggcgcagtggcgtgtacctgtaatcccagctactcaggaggctgaggcaggggaattgcttgaacccaggaggtggaggttgcagtgagccaagatggcaccactgcactccagcctgggcaacagagcgagactccatttaaaaaaaaaaagaagaagaaaaaagaaaaaaggaaaggccctctgtgttgtggttaggacctcaggttctagggccaaaaatctcctggttgactgctagttggtcactttctaccactgtggcgcagggacctcactgtcctctttaaacatccatttcttcattgtaaaatggtcacataagtgggggaacaggtgagatcacgcacaagaagcatcaaactctgtgtagcacgttagctcgtaaaggattctcaccattttcattgcatagctacgcatttagtgaacactaatgaccttacatatttgtgtgtcactgtgtgaacttataattccatgtccttcatgtaaacgatgtgtttacatccaacgtattttcagagactcgctttactgcctcacttctaattttctatgatatacgattgtttctgtgtaggcaacaccagacattgttttctgatttaggctggaacgctagaaaactccaccgcctgtatgtgaaaatgccaatgcattttataagcaaagtcaaccgcaaaatgtttatagggtcaggcagttagatctgaggtacaaacatggtttagaaggaattcttacaatggtgctaaagctctagaagcaaatactatgtgggaggccatagaaagagtgaattgttgttcacacttcagctttgatttggagacacctgtgaaagaaaataatctttttcccagtacttactggttattttatttccagaaaacatgcttgttattttagccgaggtaattgccttgcctttcgggtatggtttgtgctaaatgaacagtgacacctactggcggaagatgatcacgtttatttactaaaagaagctcctgttctcactttgctgggtataatcccagaaataatacagaatgttttgatttcaaagagcaaagaaccaacactggagttaaaaagaaaaatcaaaccacgtcaaggccgatacatgaatatagacagattcactttctggagtgaagattgctcttttcttctctaaaaatgctgggttcccccaaccaccaccacaaaaataagcttgtcagagctgctccaagtaaggcagttcaagtgccaaggaaagatgtttggcttgacacacctgttcttcttctctccgtggagtaaacagattggcagaggctgcttcaaacacgttatctgtctaactcattacatattaatacttccaaagtaaatctctccattctgtaactttatttaaatatttttattaatatacagtaatacttttccagatggccttatcagaagttttagtgagaataagcagctgaaaacacaacagctgctctgctggcagcctgagagccctgcgctgtgatactgccaggccccccatggagtcagccaggcctgggggccaggcccaggagggagcgtgggaagccagcctgcagctcccagcattactcatgcccctgggtgggccactgagtctgcgtctaggtttggagtggaaagtaggaggtctgtctacattcccccagctcagctttgcctagggccctgtccttgggggattattagacactgttgatttacaaaagctggtattttcatctaatttggttctctaggtctagaggttaaaacccaggggggccggagggatgactaattggcagcctaaatttccaatgtgttgtgaaagttatttaacctgagtttccttgcctgtgaaaatgtgtgtattgagtactgctgtgacaattacaggaaacaatagatgtaacccccagccccgtgagttttttcttttctaagacacaaaccccattctcagagttatgggagaaggtacatttatacactttaattcagagacctttaattcagagattaaatcaatagcgtgtggtcttggaggcattagatgactttttttttttttttttgaaacggcgtctggctctgttgccaggctggagtgcagtgacgccatctctgctcactgcaacctccgcctcccaggttcaagtgattctgctgccttagcctcccgagtagctgcgactacaggcaggcgccaccacacccggctaatttttgtatttttagtagagacagggtttcaccatgttgaccagaatggtcttgatctcttgacctcgtgatttggcagcctcggcctcccaaagtgctgggattacaggcgtgagccactgcgccaagcccgttagatgactttacaggccatcaaaaacccgctgccatcagaaactctggacccacaagcaagctctcttcttgctcttggcccaggtctggagcttgaatgaggggtgagcatgagctagcatagccacacctcctactccttcctcggccccatctccctccagagttctttcctccatcttcctttcttctttctggtacctcattccagagctttagctgcttccccaatagacgtggctttcaatgcaaatcctgcattctgacctctctcctgggtgctcagcatctgctggacgtctagatgggggagtcttcaaaacgccaaggcccctgggcaggaggacgggtgacagttcggtgtgtatcaactccgtagcacggttgatacaagccttgccttgaagcactttgtcttatggtcagaaccatgaaccatcctttctggcccatattaataagattaaaagctggtagcttgcctttttccctgcctggtttttatgagcaaatataggacactgtctcctgcgaggcagcagcggatgaggctggtcgggggtcactggtaagaacgggtctctgttgctattactctctgttggtctgcctgggtttgaatttggatgccgagagctgatgggcctatcactggagtgactttgggtgagttgtttagcaaatatatgcctcattcacacatttattcaacaaatatgaactggcatcatctacgagccaggtcctgttctaggcactgggaggcgtcagtgctcaaaagaaacaaagttcctgccccccagtgtgtgcgctctcctcgggggaaaacagaccgagaaaaacaagcccaatccgtcatcaagctctccagttatgttagagcagaggtggccgcacttttcagtaaagggccaggcagtgcgtctgttagctctgagggccactggtcattctgtgaaagtggccacagacaatacacgaaccaaaaggtgtggctgtgtcccagtaaaatgtgattgtaaagtggttcgctgacctctgtgtcagagcatttccataggcgccgtggaagcaaagcgggggagtccagttaaggcggatctgctgcgcctggggtgggaggatgggaagagcaggttgaacttcagagtaaacttcatcgagaaggtgcgatttgagtaaagacgggacccggagggagccagctgggtgggcacctgcaggatcccagggcattcccagtcgagtgacgcaggatgaaagcccacggcatgttctggcacatccagagagcaatgcagctccaggagacactgtggggagagagggacgcagtggggaggcctggtgaggacccctggctctcattcccagtgaaatgggcagtggcggggagtgagagcagaactgacaacatctgaagtcctgctctgactgctgtctgggacgaagctcaggaggggccgggcagactccaggagagattagactattgcagcaaccagggcaggaggtggctgtggcttagttccgggcggtcgggggctggcggggggtcgggggggggggggggcgacatttcctgaggattgtaagagaggcgtgagaaaagagttataacacctggaaggctctgcgtttcctcatctgtggctggaacaatcactctgccgcaggattatctgaggatcaactaagttgactcacgtaaagggttcggcacatgcttactacttagccattgctcagttcatgtaggtagtgtcgttattgtttattatgatgattatggagttgttcaaatctagatttgactctaagctaaatcacctactagccagaggatcttgaaaatgttcgtaatcttggagtctcaattccccacgtatataaaatgagtttaaggcagaaaatggggaggcctctctgcatgaatggttcctcgcggacacggtaagttgttactgggtctgactaggtctcaattatgtgatcaccactctcttggtgcccctctccggtgttattctgtattctgttgagttagccatgttctccccaagtctctttgggagcagactgccctgcagtcaggccacagagctctggagtcctgtggactccacactcacggtgaagtcgtgggtaagaaccaggtgacgctccgcagaatggcaggctccgtccttccctctgaggagctgccaacagtgtgtaggtggaagaaagtgaattcctcctatgcctagctccctttcaaaaggcatttaatttcctgtgactgatgagagagtttgtatttgaaacggaagcctcttaatttatagcccacaataatagagtctggcaactacagaccctcccggtgctgttcagcggctgccctgcctgcggagaccctcctctggtggagaagcataatgtgcctttcatgccttttgcactttggggcttcatcaggaaaagatgaccttactcagttaaaaaaaatcctcttcatcagatgtgcagtagctgtgaaacatcaagaagaacacatgccattgaagggtgacacctgaattacctgccattttctatttttcaaaacagtctcagccaaaaggctagaagtgaataaataattctaccacgactcctctaaataagattttagcactctgttatttgcttcgaacaggagatcagagaacatttgagagtggcactttgcatttgggacatggcacggaagccgtggctggaggccaaggactgtctcaggcagaaacctttgcctggggcctcgggtgcatctaaacagaatctgggaataaataccaggacctgacacagagcgcccgagaacacagagactggccgctgcctgtgacaaacaacgctgaacaccctccagccttccggagaagggtgcacggctctgacatctggggagaaaatgctggaaagagcctcttctgcaaaattgtgcatggagattgagagcatagtgtcgagtttccaccttgttgagagtttgtgctccagagagccatttgcagcaaagaaagagagaagtctgaattaaaatgacaccagtaccctgccctcactgaccctccccacctcggcccaggacacagtgctgtcgaggagtttcacgtcccaccgctctgcctggctgcttctctcaggcaccccttccttcctggagttatcatctctttctgccacctctgcctcgcttccctttccacagtctcctcttcagaaggcaggaaagagaaaggaacagcagctgggtgaggctcaccctgcctgacttcatgctgtaaatgctccctgtcctctcaggaagtttcccttttaattaaaaattgcatttttgaatgagcttcctcagagctagggagctggaacatctcatttgtgtggcattatccttgttctcaggaatggccatgtggcttccttctcagctggactcctgtgggaagctgtgaacagaaggcgccctgagacgtgctcaggtgtccctgggacccggtgcagcccatgcctctgtgagcttcatctcatgccaacacccccagttcccaggctttcctggcccacgctgccatcccaccatggccagcgtgcccacatgagcccgccaggttccggccttctcccccagttctcactgcagcatgcccacttggcttccattcccagctggccagatccctatgtcctctctgatgtattcggttactctgtgttgatgcactggcgacctgctgcagctgtcattccctttgctgcagtatgtgtatatgaattcttcttctaatggaaagagactcaggaagtgaagggaaagcggagggaggacaggaccctggcagtggaacaaggaacaggaatgtcacggggagtcttacagaccctccagaccgtgccctggaggccagtgtccgggagacagtgggtttccacaaataaatgggaaggggtcccacgaccctaaatgcacattcctccgcccctcagacttccacgtacttgacctcctggtgttatttaggtgttcagaaaaggtaatataatttccaaaggagctgaatttgctgccagaataaagctcaatccctgcgagattctagtccagcagtcaggaaggcaggcaagagcagacagagcctgtctctgattactgttccttctccagcacaggccacagggacacgtgcatagctgctgcttaataagctcttgctgactgaatgagtgaggaaggaatgagtgagtgaaggaatgagtgagtggaggaatgagtgaggaaagaatgagtgagtggaggaatgagtgaggaaggagtgagtgaaggaatgagtgagtgaaggaatgagtgaggaaggaatgagtgagtgaaggaatgagtgaggaaggaatgagtgagtgaaggaattatagaatggaggaatgagtgaggaaggaatgagttagtaaaggaatgagtgagcggaggaatgagtgaggaaggaatgagtgagtggaggaatgagtgagccgaggaatgagtgagtggaggaataagttagaaaggactgagtgagcggaggaatgaatgagcggaggaatgagtgaggaaggaatgagtgagtggaggaacgagtgaggaaggaatgagtgagtggaggaatgagtgaggaaggaatgagtgagtggaggaatgcgtgagaaaggagtgagtgagtggaggaatgagtgaggaaggaatgagtgagtggaggaatgcgtgagaaaggagtgagtgagtggaggaatgagtgagtggaggaataagtgacaaaggaatgagtgagtgaaggaatgagtgagtggacgaatgagtgagcagaggaatgagtggaggaatgagtgagtgaaggaataagtgagaggaggaatgagtgagtggaggaatgagtgaggaaggaaggaatgagtgaggaaggaaagagtgagtggaggaatgagtgaggaaggaatgagtgagtggaagaatagtgaggaaggaatgagtgagtgaaggaatgagtgagtggaggaatgagtgagtggaggaatgagtgaggaaggaatgagtgaatggaggaatgaatgaggaaggaatgagtgagtggaggaatgaatgagtgaatgaatgagtggaggaatgagtgaggaaggaatgaatgaggaaggaatgggtgaggaaggaatgaatgagtggaggaatgagtgagggaggagtgagtgagtggaggaatgagtgagtggaggaatgaatgaggaaggaatgaatgaagaaggaatgggtgaggaaggaatgagggaggaatgagtgagtggaggaatgaatgagtggaggaatgagtgagggaggaatgagtgagtgaaggaatgagtgagtgaaggaatgagtgaatggaggaatgactgagtggaggaatgagtgaggaaggaatgagtgaggaaggaatgagtggaagaatgcataagtgggggaatgagcaaggaagcaatgagtgaatggaggaatgagtaaggaaggaatgaatgagtggaggagtgagtgagaagggaatgagtgagttcgcagacagacactgtgttggtctcttaggcatccctgtcgccatggcccccagactctctgactgtattagtctgttctcacactgctaataaatacatacctgagactgagtaacttatcaaggagagaggtttaactgactcacaattccacatggctggggaggcctcacaatcatggcggaaggccaatgagggagcaaaggcatgtcttacatggcggcaggcaagagagcatatgcaggggacctcccctttataaaaccatcagatcttgtgagacttattcactaccacaaggacagtatggggaaagccacccccatgattcgattatctccacttggccccactcttgacgtgtggggattactataattcaatgtgagatttgggtggggacacagccaagccatgtcactgacctagagcctccagggtctcatgagtaaaaacagaggccctaaatcctgcctcacagtgaaactagagtttgccagcatcccagaggccctgcactggtttatatcaccgctgataatattaggttttttatctgaaaaataaaatctactacagggaagcaggatgagtcaactgccttccttccacctgaggaaaccggtttcaggatgaaacttcctgtttagccagattttgtaaacatgatcaaaccatcgagtggccctttctgttattcttatgggtaggtgatgagttgctttgcttggttttaaggaatcccatatcattctgaggattcaacgttctgcccatacctgaggctgctgccatcaagccccttggcgtgccgttgtcatgagcaccaatgatgcatttcccatggcactgttgcccctccctcacagtgaccccgattctcttccctgcatcctccccatcctccattccatgtttccccaactccatctgcttccttgtaaccaacgcatggcccacgatgagcaccagaatggaggaaatagctcgcccttcccctctcgctgctgtgtgtgtccagctcagacccgggctccttagagtatctgccaggagcagggccttaggggaccaagagcttgctgtgaaacctgaaaagctcaaaccagcagcccccttacagttggttgggaagccctcatccttacttaaaagctggtgccactgttcatagctcagggattgtacgtgcttcccccaggccaggaaaggactgaaaaagagctgggcccagtgggtatgagcggggctcagcatggcgctcacatcaaccaccactcccagatacactggaggaggacacagcaggccaccagctctgggacaagggctaccagctgagacatgctcgtactctcactcatgttcactctccttcagattcctggccacccacctgccccaggccccctgccacaacttatgcaatccttccccatccccttcttcaagggcagcagacactcaaaaaaagtgccagaccgctgacccagcagatgcacgggctgcccagagcctacacctatgatcttttgcatcctagcacaggtacaggaaaggtcactgtgcctggcttagcacttttattcatgatacacatgagacagaatttaatcttcctgtttcaaatactccctgaaatattttccaattctgcttctcacctgaaaagcaagacagggtaaactttatgagaatggatctgctactcagatttatatagatacatcacagttctattgatctgaggaatgctgagaaccttgggaattaacagaaggcagactgccactgggcctgcgctttcttcaggccggtgctgaaggggttgtcatctaacagcgacctgactctgaaagaacactgggtttgcagcacgtgacctcaaattgggtcttaaattcttattccatggattgctgtttattgcaaaacatcacaccaaggttgggcttgctttcatttttatagtgacggccttatgtgattccactgaacattctggcaatctaaaaatatccagcaagcacaccactttcctttgaactgagaggtgctgtcagtaggaaagctacttgtctatgtcctgagaaaggggcactctggaaagactgggtccttccgcattttatgtattagtgtcagcacactgcgtttttgtgtgccatttggtaatttcttctggaaaatcctactcagggagacatatggccgttataacctggcgctttagagaacacacaatgctgtcatcgtctcagagattttctgtccaaaatgcttgtagtaatgaagagtattctcaaccattaccacagagtttaaaaatgtgttctcctggccgggggtggtggctcacacctgtaatcccagcagtttgggagtccagtgcgggtggatcacaaggtcaggagttcgagaccagcctggccaatatggtgaaaccccatctctactaaaagtacaaaaattagctgggcatggtgatgggagcctgtagtcctagttacttgggaggctgaggcaggagaatcgcttgaacccaggaggcagaggttgcagtgagctgagattgcaccactgcactccagcctgggcaacagagcgagactctgtctcaaaaaataaaaattaaaattaaaatgtggcctccttaatacagcatctgcaagtcttgctgcatgcttgtgaattacttggggggatagcatataaatgggcaaagtccacctcattttagataagatttcattggctatttcctaatgttttattttaatgaaataatgaaaagagatgtcattgtggattcttttttaatgcccatgaatggtttctagtgacattgtatggggacaaaacatacacagcagatcttgccaccaacagcattcccacaactgttttcttcctgcagatcctacttgcattccacacatgtccactcccggtatcagcctcgccgaccccctgacccatggcacaggctcatcagccctcaatattgttaagtggaaaaatgaaagagtttttattattacaaaagtaatacatactcattagacaatgtcagtaaattgtaccaaaaaaaaaaaaaaaaggaaaacctagaaaacaaacataatcccacgtggctggacatgggatttttgactcattgctgtagagctttctagatacgttttacatgtatacgcaaacccacatgtccgcaattttaacagagacgagtttatgctgatgggctttttttttttttttttttaccagtttttcacccttaattgtgtgtcacaaacatctttgcatttctctaacgccatgtttaatgatgaccatttgtcagggtgtgccatgacttatgtaaatgtgtatcttgcggaatgatgataattttcccacggccgaatttttcctgtgttcctgacttttctctaaaaagaaaaattcctagaagaggaagttagagagtcaaagcatgtgcatgtttttaaagcttttgtcaagcctgtccatgtgaagagaccaccaaacaggctctgtgtgagcaataaagctgtttattcacttgggtgcaagtgggctgagtccaaaaagagagtcagcgaagggagataggagaggggcagctttataggacttgggtaggcagtggaaagttacagttaaaggaggttatctattgttagcagaggaggggattacaaggtgcatggtggggagatcataagactcattgtccgaaagaagaatgtcacaaggtcaactgatcagttggggcagggccagaacaagtcataatggtggaatgtcataaggttggtcaatcagttatggcaggagctggctgtttcacttcttttgtggtttttctttggctgcttcagacttcttggctcctgcaggccatctggacgtatatgtgcaggtcacaggggttataatggctgagcttcgactcagaggcctgacagctttgcatccaacacttatcctcaactctaagaagtacctttttgtgtattttaacatttctgaaatcaggatattgtaaattgatgtggatgtttacaatggtagtatgatggagcttttctttctttggtcaagccactattaaattgaaggtgctttttaccattaatgtcatcttagaatggaggcatttcagtcctgttaaattacctcccagcaaacaattgtgccagtgtgcagagcctcccaccgagtgcagctgcccccttccccagcccctcccttttcagctttgccaaatgagaagcaatattgtttcttatttatcaagtcagtgcgtttctatatttatgactcactcatgattaattaccattaacatctctcttagcagttataattttggtatgactttttgttttccatgtagattatgactctgtaaaaaattgtgaaaccatatttataaaaatataaagacattttaatgacaaatatagcatactcattatagaggcttttatgtaaatataatttggtgatcttaatttgaaataaatcttaattaaatttctctgaagtcccattttgttaaaaatatccaacgagcctaaaccttggctggcctaagctcatgatgtttccaagtcagcaagaagctctgtccttacccgtagcagcagtgccgagacgctcctcttcagttctgtctgcatttccaagtccatcaatgatggtgcaattgtgttgacataattcattgcctgagaaatgcttacagatttgcaaattccagattgtggtaacatgattgaacatgactcggcgtgaatcactgattgacagaaacaagttgtatgtacatttgaaatgcttgctcatcactgaacacaaagagagaaggatccattttgcctgcagagaatggaaatgactggggccaaaggagtttttgttgaaagtcactgtattgccattaacccaaaacatatttccttcgggctaatactaagaagccactttgttgtgctatatagagcattgcactcaaaatcctgtggttactgatattataaagcagaacttagggtaccattcaaagaaacaaaataggaagttcctatcaagttacagtgattgaagcatttaaaaagtttctatatactgagcagacatctcgccctaaaagaagaacttgaaagcaaccaccttacgtttttggtggatttgagaaaaatagctaaaatgtgcccatagtggatcagcacccttttagataacatcaaactaaacttcatgactttgaaaaaaattgagaaaagtagatgctaagtgggaagattttactgtaaaccaacacctcaaatcaagtgtgtgtatatatatatatgtatatatgtgtatatgtatatatgtgtgtatatatgtatgtatatatatgtgtatatatatgtgtgtatatatgtatatatatgtgtgtgtatatatgtgtatatatatacgtatgtataaaggaacaaaacataaagccaggagattgtgagggtcatttccatccacagaccaatccccagcttcccttatcaggttctttcccagtgctcttaaggaggtgggtttactcccatgctgagccagtgtcagatatatgtttattttagatccttgaaattaacttgacattcctcttcagcaaagaaaagcatcattttccaaattagtgggagcaaaagtctactttaaaagaaaaatctatttggactgccaaattggtaggaacaggcatagacttggcagttaacccttctgctgatcccctgttgccacttctcaaatggcccaacgggtacgagacttggaacacgagcctgcctggctgtgagcactcatggaccctcagtttcccttccctttctcctggaagctggcccaaaatgctgattatggtggacccaaatttatttatttatttatttatttatttatttatttatttatttttaatttttattttattttattttttagacagggtcttgctttgtcacccaggctggagtggggtgcaatggcacgatcttgggtcactacaacctgcacatcttgggttcaagcaattctcctgccccagcctcccaagtagctgggattacagatgtgtgccaccatgcctggctaatttgtgcattttcggtagagacggggtttcaccatgttggccaggctggtctcgaactcctgacctcaattgatccacctgcctcagcctcccaaagtgctgagattacaggcatgagccaccatgcccagtcagacccacttttaaacagcaattttgaaaaagaggggcatgaacacaggatggcaaatgacgactaatgacttttcccccaaatcccattgtaaatcttgtcactgtgtgaccaagcctatttcacccactgccatttgttcctggcccataataaagtaaaggcctgtgagatatttggagagataaatcagcattcagtttaaagagtcagagctggaggagaaggtgggaagcaatgttatcatttagtctatcttcctgccttcaatgaaaatataaaacattaaacgtatatcagaccatcccagtaagagaagaattagtccccctttttatgactttacagaaacatatacttttctgctggaactccattccattgcagtatttacggcttcgcattctgtttttagaagtatgttgctaccgacttgaaagaggatgtcaggttctctgtagcaataaaggggcaggtgtggccatctgtgccatttcagtgacttatctgaataagcatttcaatccttagaaacagagccttcccatggaaaatgcttgattttgacttgcgtcattgtgcagggagtgatatacaccatgataaattttcctgcagaaaagtctttctgaacacagagccatagaaatgaattcttacagataatgtaaacttagagacaccctgacacatttttgttctcttaattttgaatcttaactaaattttgcagatgccattggggtcactgagacaagaaactgcgttcagtggctcatggacactgatgatattagctcaatttatagagttgtcttgtttgcgtcttgatgaatcttgtttacccttcaagacacaaagtgtcactggggctgtggaatttggacagactgtccagggagagcaatcatctcctcctctgtgactgctctaacctctgtcatcccgtctatgcgttgccacacaattttctgtctaggtgcctgtgttcttctttcttttcttcctagaataaacctttattaagctcctactcagggccaagtacttagatagcagctctcagaacacatggggtgagagagctgggaacttgagtctagtagggatgatggataaggaaatacccagtgcagggtggagggatttaggatcaggtcagtacagagtggtgagaacacacaggagaaacagcaaacccaggcctggggtcagggaggtttgcccaaagggatttcctaatggggaatcagagtactccctagaatgatctctgttgctacatggaataccacagactgggtaatttataaagaaaagtttatttggctcttgattctggaggctgggaagtccaagagcatgatgctggcatctggccaggatcatcccacagcagataggcagaagggcaaaggcatgtgtgaaagagagagaaaggtttttaacaaagctcctcccacagtaacccactcccacctcacagcattaatgcattcatgagggtggagccctaatgacctaataacctctgaaagacttcacgtgaataaaatctcagcatgagttccagagaggccaagcattcaaaccatagcaatccctattccaagtcatctaggcaaaggagggctagggagaagataggctgaggagcagaggataaaagcgtggctctccagagagtgattctcacagagatggggcagagtcattacgtgctcctgccctgaggccctgcactgccagagagaagcatcctctcaacaaatgcttgtgagataaaggaatgatttgatttggaacaataaccgaccccatgagcgtttttccgtttctccacaggacaacagtaaagggccctttatgagctattagccttttgaaaatttggttctcatcacagagatgggatttcaaagaataaggagttagatcattgttattatcaaaacaatctggcttttttgtgcttttttagtgtttgccatgatctatgtcgttaggcaatttttaaaaatatagaatattaggtcccaatattattaagagagccagaagaaaaaggggcagtattctaccctacagatgatcagctctctgagggccctgcagttctaacagtctgtgccactaaatcgagagggaggaagggcgcccagcactgagaacagttgatgcttcactctccattgttattcagctttgcaggagttcaggaaatgccacctcaaaatatgatgctttggtgtgctgactccttaacagaggacacttggggaacagcaaattcggggagggcctttctctgaactagcttctctgcaaatacaattgatggatctcagttgtcgtgaatcccctcccagggaattgtgtcagccggggaagatgagtacgtggacaccatgcctggagagactactgcctgttctgctcagggctgctcggagacaacttttattacctgagagattgtttatctacataataagacaacctttattcaccatacaattcctctccttgccctcctctaacctcctccccctcacaagaatccccaagcccctgttcttttctgtatctaggatatagttctgtaggcttccatgatctaacccttcttggagtctcatattctgtgggactctcatgtgtacagaattgaatatgctctttctcctgttaatctgtttatatgccattttaatcaatagcccagccaaagaacctgggagggtagagggaagccatcttttgctcccccacagcttccagaatgtctctcatgttatgggaccaaaaagctatttattagtagagaggcagcaatgtctgtggcatttcctcgactcacctgagatccgcgcattatctcagccgccctgggacacagtcacttgctctttagctgtcatttaattagtttgctttctatgtccttagcaaagcaataaaattgagagagaaaaagaaaacttaggcaggggaagagtcttataagtctgggttttattttataatttcataagacactgcaaggtgtgcatgttgctgggagatagcatttttcaggtcactgaaggcatttggcttcacctcctgctcacgacccccgaggcatgagttatctttggccaacaggcatccagaggagcctttagagcctggcctgccactgagactgtcagggcggtgatgacaatcagctctctaagtggttctggctctcaccattgtctgatagtcatggcagagatgcatatcgagaggataatgtgggaaatgctctcaccattattacccagccccaagctgggaaccttctttaagaggccttaagaatataagtagaagcattaacggcttccgctccagagattggtgtgtgaacaaacatctcagacctctggatctctcatcttctctctcctcctttgagccagaacattcatgaataatcatttagggcagaggttctgggccagaaacatctgagatccagtccagcccccggaaatccaaatgcagctgtctgagaatctcatggagagacacaagcctagaaagtgttcaagacatttgggggatttatttcagcttctgtcattagtgtgtgcttaacttcaagggtgaaatccagatcagtactctaattttttttttttggtggggagtggggacagaatcttgctcttgtcgcccaagatggagtgcagtggcacaatctcggctcactgcagcctccgcctcctgggttcaagcaattctcctgcctcagcctcctgagtagctgggattacaggcgtccaccaccacgcccagctaacgtttttgtatttttagtagagatgcggtttcaccatgttggccaggctggtctcaaactcctaacctcaggtgatctgcccaccttggcttcccaaagtgctgggattacagatgtgagccaccatgcccggccaactctaacttttaaaattaattctttggtgctaaagcaagactggcctttggtagggtggatcttctcctcaattccccaggacgtgactgaactatcacaaatgaaagtcctgttgctaaaaccatgcccgaccaagccttccagcctgatactttacatgcaaaaacaggtgtctttgagccaaccttctttgttggctaaattaagagactgcaataacaccaggccaaaacttacgtgaatggtggatttctatgacttcgtgtttattaagctcattctataatgaaggatggtgctgcagccatcagaaacagatgtttgtttgcagtgtactctgatcaacagtcttccccttgagtaatggcctggacgctatctgtccctggtccaagatttgacaaagtgtgcaaacaagtaaatcagacacagtgaaagttagcgataacccaggacagttcttattctctggctttctttaacaaatgactcagagtgtgtggcagaaaaattcatatgctctcactgcagggcagttacgcctcatattttctttaatttgactgattttctgtcccctgcagctcttttcttcaacacagtgtgaagtgaaactcatatgggtcgtccaaaggctgaaaataaacacagcatcctttattcgaaaaaaaaaaaatctgaatttctttgtcttagaatacgtttaattttcggccgagcgtggtggctcatgcctgtaatcccagcactttgggaggctgaggggaacggattacctgaggtcaggggtttgagaccagcctggccaatatggcgaaagcgaaaccccgtctctactaaaaatacaaaaattagctgggcgtggtggcacacacctgtaattccagctacttgggaggctgaggcaggagaattgcttgaacctgggaggtacaggttgcagtgagcggagatcgtgccattgcactccagcctgggtgacaagagtgaaattccatctcaaaaaaaaaaaaaagattaggtttaattttctaatcttccccatgtccccagctcacctcatcctactttcttctaaaatattggaggtgttctgtcgcttttgttctgtggacccttaactgaactctgcatcgtgcaaggagtcctcagacagcagggtccttgtagacctgcgcagtccagcgtggtggccagcatggtggccactagccctgtgaggctcctgtccaacatggtgcccacgtgaggctcctgagcccatagaatagggctagtcccaactgagatgcattgaaagagtaaaagcagacccgattccaaaagcttagtaaaaatgaatataaaataactcattaccaatttttatatcgattgcatgttgaaatgatacaattttgaatatatttagttaagtaaaatattgaaattaattttacttgtttctttttcctcttttcatatagctactagaccattaaaaattattgctgtttcaattggacagcactgttctaggctgtatcctttcacggtggtttcaaaatcaaaaagacaaaagtgttgcagaattacactagcagagtgaattacactagaatgctggcatcatccctagcactgggattggtactttctgggggctatcatttccagcaaactccattggtcccagttcaccttcctcttcttactgctgaaacgggagagttccctgacccaccccggttgcaggacatgcaacaggcatatggctcatcagttcagccaccaccactgctcaaactccttatgggagggggagcatgcagatgagcaggtgcaggagccaggacgagcacttctgggctctggccccacagtagtgtctagggatgggtgcctgtgactcccaaagcccagttagctgtgtgttacagtgcgctcttttaattttgctgtctgcagacagcttaagtgttaaacagctcagtggaccctctgcctttttgcaagggcagagggccagtgtgacagctttccatattccaagttcttgtctggcatccagaaaaatcaggtcacccatggacttgaaggatggtgactgcagggttttattgagtggtggatgtggctctcagtgggatggatggatggggagctggaaaggggatggagtagaaagatgatcttcccctggagttgggccgtccagcagccaatctcctctctaactgtctgcagcagaactcctctcgacattcagatattccttctcttctctcctctgctgctcttctgctcatggagcctggggtttggagtttatatagggacaggataggggggcatgacaggccaaaaggcaacatttgggtgtgaaaacaggaatgcctgttcccatttagggccatgggtttccaggcttgagggtcaggcctttgctggggaactgccctcttctacccaatatttccctgtctcctgtctgtaacctcctcatctcctcactacaacctgcacctcccaggttcaacactgtgctcccatggaacctcacatccatcatatgatcaggacacagctgactgtgaactctgtgaggccatgaagaatggccagtgccttaccattcacacacagtacatgcttgatgagtacttgtggaatggagggagcattgggtagagcaagggagaggtgaattgtgactcctctgaaactggaaattacatacgttctgcatctttgcaggctccagcaatgcacagcatacattctgagtggagttcctgagtaggaacttttggttgaatgaatgagctagaacagggtctctaaatggtgcatacaagtcactcggggatcctggtaaaatgaaagattctggtctagtacttcttgggtggggcctgaaattcgggttttctgacatgctcctgggtgatgctgatggtgctagtctgggaaccacattctagggaactaactagagccagtgctgtgatgtgaatttagttatcaacatggatgggcgtcccttcaattcatgtctcatggatgctccaactgacagtaactgtttcagcctcctctctatctgtgactctcctctccccctagactccagaagattcagagctgctatggtgctctgttaggaagaccaagggcatgggtgtcatctccttgagaaaactctctcatcaatgtgactctcctaggattttgctgcaaaaccttatcctcctccattgaaagccataaacctttgagtgtgtctccctagcctcgactttctctgggacttcactcccatcctgccccctctctggctagcgtcttcattctctctcttttcatcatcttttgctgttttcaaactgattcagagctctctgttgtgaagccttttccaccccatcatgcctgtgatcttagcctctgaatctagctgaccattgaaccattggaccaaaattatggcctccgaggtcactaaagtactttccctggcagaaagtcttagttattcctcttgtactcaggattgacctctccattctcagtactgggtttcctcagcactgtgctatcctcttctgcttctcagaagttgaggcttttccagctactactgcttgtttattctgcaaaggtttgatgattgccattattctgttaggtccttgcaacttcatgataatcacgtggaattagaagtgacttgaatttgaggtgactgcaacctatccaaatggaaatatgcaataggcaaagtgcatcttaaaagaggagttgggaagggtggaatagattttgagaagttgttagaagagaggcagtcaattaagcttgatgttagaatgctccctgaaggggcaaatgtgaagggcagaaaaacaaatgctatctccacgtgctcttacccactgacctcaacccgcctggatctcttctatgggacccttaagacttacacaagaatactcaattcaacccatgattgtgcattgtatcatggagtacacaattgtccttcagctcttttatgctttataaacatccaccttagctgtaagctacttgactccagcacctggattgccacaaagagacactgatcacctactatgttctagcacctggatcttgggaagacaaagatgaataagatacaaatcctatccctttagaagaggagataggtggagacagtttcatatagagggtgaaacagtttaatagaggtatgagtaagaaacagggcttgggaagaaaacaccttgatcattttggctgaggctgcaggggaaaggggccagaacaggtatacctgcagggcacctatgagactgctcaacatacaataaagggttaatgtatcattttgactgattgattgattgatcattgaggagctgcaaaacctccaaagacaaaagtctgtaagatgtgctggcagggtgtccccaaacatgttcaggcctctttccaaagctggccttgccccaagttgcccagggcgggcccaggtattcagggaaagcatttcgcctcccctgctgtgctagagagcataaggatacccacaggcacatgggacaaattgggctcaaattgccatatggcttggatttcacatttttactggcgtagcgtaatcatttctacagagtctagtgccttgctgcagattgtaaatgataaggtcacgaggattagggaccagttaaaaattatagaagacatatgctgtgcgttttactaatgaatggccatattcaaacatgttcactaattaatggcaatatttgaatgggcccactaatgaatggcgatgtttgaaagtggcattgaatttgatactctgtgaccagtgctccagttctagaaggagccaactgctccataaggtctgagaaatgctcattttaaagcaaaattgggcaggccttgcaggatggtaaagggaattctcagttagatattgaaatttgcccgccaagaagtttgtttagatgaacaggatggtgtgaacatatcattgaacaagagttccagcttgcaaccaggtcctaccttagcctttgggaacaaggtaagccatgacacaaatgccagagctggggaccttggaagataaggactgtccccataggaattgttttcagaaatggttacagtaaagagaaagtaagaaaagaggcgggggattagggaccgagagcatacagcactcccaccccagcttcccctgtcctctggcagactgctgcagtcaggtcacctggcaagcgtcactgagagccaagtctgcaaagctgaggctcacgacacagccacaagtgagggaagctgccgttcccccattcactgtttctttctctctaacctggacctctaatttgttggctgtctgtgtttaaagccgctgagcttaaattcattacaagtcctttcctggcaggcgggccagattcaggcccatcagaatgagacgaccagctccatgtgtgttgagctgaggaaagtcagagtgagcctgaccacaggccactcctgacccagctttggctgtgtagacaagacttaaacgtggtcagagtaattgctttggctaggaacacaactctgtggtgacaaaacatgtataaagaaggtcttagcaaaagtgctgggatgtatttgatattcttttaaagcagcttgacaaaggcggtggttgagaccacagcgtgttggggaagcagcttccacccaccttgctgctaagcctgtgactgacaaggctcgcgaaagcaatcaaaatggaaagtccatatgcccttggacccagctatttcatgtctagaaatttctgctacagatttcctttcacatgtgtgaaatgacctgaagagcgggacattccctgcagctttgtttgtcatggcaaaatattggaaggacctaaatgctgatcggaggggctggtgaaatgaacgaaggcacatctatccactggaatattgtgtggctgttcaggaagaatggagcagctctccgtgtgctaatagacagccatctgtagcatgcattaaacgaaaaaccaacaagcagagtacagcacattatacaatgttttatagggtatttttgtttaaaaatagcataaattgatgattgagtgcagaacatatttctggaacaatacctatacaaacaggtgacagtgattgtctctgggaagctatgtagctgaccaaggaggaaaggagacatttttcacaatgtaccttttgaatctgtgctacctgcacatattttgcattcaaagaatacctactttttaaaaatccatgactctgcaaatgatatttcagtaacgctcttaaagaaaagaaaaaaataaatggccaatacacatttttaagtttattttccctttaagttatggtaaaaatcaaaactattttggagtaggaagtaaatgtaaatgtctttgtccgtaattatagactggatagttaattcccagcagaaccattgtcaggaggaccaccttatcatggatcttttaatgtgaggtgctgaggtcagcctgttgaaagtaagctcagtgggtcttttctcctcattgcatgaactcatcttctctgaggggccctagttctgagacaggtggtactaaagtttcctactagacggtactcatagtgagtgggtcagtgcagactgcacaactgaaagatgggatggttacgtgcacgcgcatgatgatagatgttggtgtaagaaaaggggattttcggggatcttttcagagcttgcaagaatggaaattaaaccaaagaaagtaaggacctgttcaaagagcaaacctaaaacaaaaataagcctagggctgcagggtgttggaggtcacaatattttgtgggaaactaattggcattgtttaatatccctggggattagtacagaatttgtgaaagacaaaggaacgtgggtactctacagagctgtatccagcctcctgaaaattctttctttttagccctttggagaccacacatagaacactgtcttcgtctgtttgcatttggagcttagcacagtttaagattgcctcacaccatgagagtctgtgattttaagatgttgtgtacttgaaaggaaataaccttactttcttcttttcaaaattgtgttttaatgcattataatctaacaccatctccgttctgtggcactgtcttgtcagaacgagttttgcatatatcagcggctggtgactcatagggagacttcctctcttgatagattccctttacagaggctggacttacgtatctctgctgccatcttctggaaagctacacaccaaaaagaaaaatatttcatctattcccaaagaagtacaaatgtgtgcttcatgcctttgatgtttgccttgactctagtaaggggtcctaagatggtatttgattctctcctattcttttaacacagaatttcagagccgtggaagaaaaataaatgcacataatagaatgcttttataatagatgcagccatgatagaaaacaggcacaaagaaatcttggcttccatagagagatcatcatcaagccttattttaagggtcattgcttgtaggtacctactggctctcaacctgattgatcagcagccactggaatattccgattgcattagaagctgttcatttgcttccttttcatgcttccacagagaaagtacacatacagccccttttgaatgtgttcattatggaaatatgggaaagcaaactcaaacatcaatcaaatgactactgcactgacatgatattgaatgagaggcatgatgggccattcacatagctctctggtagtacagagcgtctaagggggctgacagtgacttacctcagcatgtataccagcaaagagaggcctcatccctttctagacagcagtcttatgtcttatgagtagtttacaagtgtggcatttctggggaggtgtcagttttacccgagattcacataacagtcattattatcagtatactgggaactgctttaattaacaaggcgcttactaccctcttatttttctacagactcttaccacttgttaaacatcatagccccatggagaaaactatttgttgtgttgttgtgtttactgtgtaccagaaactgtgttaaatattctttatcttattatttcttctttgtagatgcaaaaaagctcaagcaaagagatgttgggatcacacagataataaatgatccaagaggcctcagactccgggtctctctacctcaaagggttcacttctaaacactaatctacatctggtatttaaacatgtaaagatctagtacacgatttcacagattaaaatgtgctattcttttatatgttgcctagggccaagattttactcatcctaaaagtaaatactcaacacatattagttgcaagacaaaaatatgacttcaatgttaagaatagtttagctattatgcaatagaaaaaaattggcttattgaatttagcctctattaaatctttttttttttattctatacctccttttaggcatttaggataagctgatgactagaattaagttaaaagtgtggcaccaagctctcaagcttgaaaacataccaaggagaatgtattaggtgaccatgtttattgtcaaatgaaaggaaaccaccacactgttggaagtggtgaactttctcctggtgttgaattctgagaggaatttgccatatggctacctggaatttatatatgtatatatatatagcgagagagagagagagagagagagagaggtttgaactataattttgcaaataacagggaaagtttaaatagttttcattacatcagttcttttgcaaaagattgggaataaagtgaccttgttaaattttttctttttctttttttttggagacagagtctcaccctgtcacccaggctggagtgcaatggcacaatcttggctcactgcaacctccgcctccagggttcaaacggttctcctgcctcagcctcccaagtagctgggattacaggtgcctgccaccatgccagctaatttttgtattggtggttcacacctgtaatcccagcactttgggaggccgaggcaggcggatcacgaggtcagggttcgagaccagcttggccaagacggtgaaaccccgtctctattaaaaataatttgtttctataggagctttatcagccagagcttcaccagagagaccagaccagcaggatgcttatatcaaatatacatacacatacacacatatatgcatatatatgtgtatatccctacatatatatacatgcaggcacacattgtatctatatatctgtgtatacacagatatatggagagatttactggaaggaagtggcttacacggtttcagggctgggtaggcacctcctaaatccacagagtggccatcaggaagggcaggctggaactcttgagcacagcctgacgctgctgtccacaggtgaaatctcttcttcctcagggaaggctcagttatgctcttaggcctttccacagattgaatcagcccccttcaggttatctaggataatctctcttacttaaaataaactgattatagatcctagtcacatctacaagaaagcttcacagaaacaccaagattagtgtctgcttgagtaactgaggaccatagcctagccaagttaatacataaactctcgtcacagggactataatacagtccatgtgtttgattgccttctaaccaaatctataagggaatagactttagagagccaatgaaataagtatgtattattttatgattgtttaaagacatttaaaatttctcgaaaaaaaaaaacaactctacggaaatggatcacatttgttagatccaccacaagagaagacaatcctgaaaatgtatacggtataaacaggactccatgtttcctggtatactaacttccattcggttaatgttgactcataaggtttggagaggtattatgcagcttaagggagcctcagcaaatgtaagaccatttttaagtaatagcaaatccctgggtaaatttcagccttctacatggttggttaaagaaggatccaggcgccccagatatgagacatgcagctcagcagaatggatgtgaaaatgttggagctaggtctgctttcttccccggcaagctttttctctagaaacagctatgccatgggaagtgtttgcaaactggcccgaacactgtcttaagaaggagttttgtatctgcctaacccagagttccccagaattctgttccccatgcccttagcggttcagtacatttttcacggtatttctaggccaaaagaaatgcctaacagttgtggttatgaaaggttttgtaccacgtagcatagtaagaattaatgtcataacgacttaatagttatctgaaatgataattcacacaaatggaaggaaaaattagctttattttattcttaaaaataatcacgtcttggccaggcacggtggctcatgcctgtaatcccagcactttgggaggccgaggcgggtggatcacctgaggtcaggagttcaagaccagcctgaccaacatggtgaaatcccgtctttactaaaaatacaaaaattagccgggcgtggtggcaggcgcctgtagtcccagctactcaggaggctgagacgggagaattgcttgaacccgggaggcggaggttgcagtgagccgagatggtgccactgcactccagcctgggcaacagagcaagactctgtctcaataaataaataaataaataaatcacatctttgttccaaatggatgtttacatggtatttgttttctattctggtaacttccaaaagcccacctttgcaaagatacaatgtcaccaaaaggaaaatagcacaatctacattaacactgggaactaccttgagttaataaatcacatagtgttcaatagccatgctgtgttttacttaaaattctagaatatcccaggcacccctgtgagtttgttacagtaccgcagggcactctggtgcgtagtgtgagaactgaaggttgagagtcttgagtcctggataatgtaattgaaaacccaaacattttcaagatcaaatcagaccttctacattgcacatgagacagattcatgttacttaattgggaaggaccactgcatgatagatctaaatttaaattatactttgaatagaagcaaattagccagtgcctccctgtgaagtcatcaccggaatattcctgcagcatttgcttgccttttgccatgctaaagtggggaggctttcatttgatatgctcttccctttctcttatttctcaatagtccattctttgtagtactggtgtgaaagggaatttaatgtctttgtgtcaggaaaagcctatttattctgacaaactgatcagcctccagggtgttcctctaccatgaaactgattttatatctcatccacgagctaataagatgtgaacggttttccctttcacaccaacagataagatttgcttctctagaaagcagtgggctgagaccccattgccagttctccatgattgggcctcccgtccacatttttccaacaaagcatgtaagagcagaggaatgagtgtgaggcagacccaagtattaacagataaatgtttttaaaaataggagaaaatcctagaactcaactcactattcagtgaattcgcttttagttcagagaaaataagatgtcagaagctgaaaccaggtaatgttggtgatttgtgtaaggacgttctgatgcacacacgctgtcccaccaacctttaaataaagtttacatttcactaaatttgagttcagtctctctgctgtgagaagaaataagaatataatatgctaaaagtgatggcttgaagatcaattgtggcatatctctgaagagattgtttccttataaaatgcttttcctttttgtttctgatgtcctgagattaaaatacttttcagatgaacttttaaaacaagaaattggacgtaggaaaggagaaaactctgttcacatggtgaagacaacatgaaggaaaaatagtgttgagtaaaagccattcttttttgaggcaaggaggaattatggtatattttgggatagagttggttttatatcctggtttctattatttttgtttttcaattcaaatcagtcctgtcttaagcaaaattaggctaaattcctaacttatactataaaatattagtttgagaacttgtaagtctctgtaaatttttgaatcttccagacactactttcagcatattatattcttatttattactgtatcagttatttattgctgtgtaaaaaccaccctaaactttaatgatttcaaataacaacagtctacttggaatatgacccagtcacatagctggcaagttggtgctggctgtctactaaaagctcagacagggctattgttgcggctgaggccgcagctcttctccatgtggggctcccatgggctgttgagcttccttaccatatggcagctgggcttcaagagcaagtgtcccaacaggaaatggaagcttctggtttcttgaggcctgggcctagaaagtggtacaccatcatttctaccatattctaggagtcaagtactcaacacatctggctgtcagcagaagagacataaagcccacctctcaagggaaagaggatactgtcagtttgcctctatgctctaagaccaccaccatcatccacacaccatacttgtggatggcactctctcctctgctgaaatgccttctctgaatacagtttctgctgtgggagatgttgcctacaacttattaaagaaagttccattgaaagaaaccagttttctggtgaggaaactccttcctatgaaatggagtaggggcaaaatagtccctgttgttcttatctccttaaagtttagaacacattgtatgctgtgattgtagccactcagcatgtgctatctcactacctctcccaggggtcatatgagaaagctatcgctgttatcctagcatttccaaggtggaaaccaaggcacagaaaccaaggtggctttcccaaggtgtttcaggtggcaggggatgggatgatgactccagtctggtgtgttccactgctgatccacaactcaaccgtgacagtaacttcagagcatggctggtggcgatgagaatgggacgtgctttcaggagaggtccatggatcccagacagacagccctaaacgagcctctctggcattcactcttccagctttcttctttgtacgatggcgggtagagggcattggttccttgggcgtcttcagtcccatggtgaatgctgctcatcatctctcagtccgtgtgtctctgtcctaatctcctcatcttgtaaggacaccagtcagattgaagaaggcctcccctaacaacctcatcttccctttaccactttaaaggccctgtctccaaatacagttactttctgaggtcctgcttccacctatccattatgtgggggcacggttcagcccatagccacccatttctttttccataataggcttttaatacgaaagtaagtccactgacatgggcatataaatcttctgtgaatgcaaacaaatattgaatgtaaacaaatattaaagggaatgtcttgaatgaagttttttccttacattctaataccaattaaactttgctgtgggtatttatttgcattactgtgtgtattagtctgttctcacactgctataaggacatacccgagactggataatttataaaggaaagaggttcaattgattcacatttgtgcagggctgagtaggcctcaggaaattcacaatcatggtggaaggggaagcaaacacatccttcttcacatggtggcaggaaggagaagaatgagagctgagcgaagggggaagcccattgtaaaaccgtcagatctcgtgagaactcactcactatcacaagaatagcatgggagaaatcatccccatgattcaattacctcccaccaggtctttcccatgacacatggggattatgggaactacaattcaagatgagatttgggtggggacacagccaaaccatatcactgtgtcttccactagactggaaacatcttgagggaaggaaatgtgacccatcatctctgtagccctgctatggtgcttggaacactcttgagtaaagagtgaacaatcccatcaaaacataacttgatttctctttgcaaaaaaagtatttttatacagaaactgttgcacaagccagaggaatgaatataatgaatttggaaaaggaaaaatgtgttattgccaaatgcaacctaatgtccctaattaatggatgtgtgttcttttgcagtttgccttctgccgggaatgtaaagaagcgtaccatgaaggggagtgcagtgccgtatttgaagcctcaggaacaactactcaggtacagaatgccctactcattcctccaagcagggctccggatacagtgggggactggagccgtttcctggaggtcatggagagttccattctaaaaaagcaagaagcagactggtagctgacagccatgggaatggggccgtggcttctcccagaatgactcccctccttggggcacagtgtagacttcccagtggccacttggggcatgtccaaaatagcttttccctgggcagatatggaacagggacaaggcatgtgagcattttcaaaggagtccttagaggggaaataaaacaacttaacagtgtctaaatcagagaaatccatactaagtctacttcaatgtttttaatgccctagtttagaatctctggtgaaaatacctctgtgagtggcatgtacagaaagatgacattatgtaaggatatcattgtcctttagcagcatcatgccctatgctaactggtgtttcagtcctcattaagtaaagaatgtgttggccgagcctcactctctaaggtgctatctcagtcttaggaaagtgcaaatgcattttattttatttattaattaggatcaaccaaaccttcagggaaaaagagtaaaaacgtcatcacagtagatgaatttgctcattatttttctcccaatgtagatgttaacaagggtttaaacaccaaatctttgcaaataaatcctttagtcattgtactgataggaacctagtaaacagacatagaaatcccagaatattttgattttacaatagagaatgttaaagatctgaatgctctaaaatcagagcatgaataagtgtatccctatatggaattctgcagatgagtttatccaatattagcataactaaataaatagaactggtgaatttgggtcttctcgtctgctcctaaattgccagccatgagcatatgagtggatttaggactgagttgccatttccatagcccaggcagcaaatgctctttctgttaattttattttagctcagggacattcaaacgcgagcttaccaggtactgacagcaaaagcaataatggcccagagacccctgcctcaggaccgctgtaatggaggcgggtatacctgaggctctgggaaacggagttagtctagcaatttacatccatatgctctgagactgcaaacatggcagaggcttccacaaagtgatactctggcatctacagtatttatttggaaacagtagctgtaagggaaagaagagcattgcttaacctaaagccatccaggcgcctgaccctccctctaatcccattcattcttcagtcaagaggaaccatccagccttggtgttaaagattaaggtagcccaaattaaatgtttttaaattgttaaaaccttaatattggattcagaaaaataggaaaaagaaagttagagatgacctaaaccatagatgtccagcatcgggggaactgtgtctgcaaatagtgtcaattagcagacattaagttgagcatttgggtgggtcaagcagctgctagactctctagaaaaatgcattgaaaagtatatttcccggccgggcgaggtggcttatgcctgtaatcccagcactttgggaggccgaggtgggcggatcatgaggtcaagagattgagatcagcctggccaacatggtgaaaccccgtctctactaaaaatacaaaaattagctgggtgtggtggcgtgcacctgtaatcccagctattcaggaggctgaggcaggagaatcgcttgaacccgggaggtggaggttgcagtgagctgagatcgcaccactgcactccagcctggtgacagagtgagactccatccccaccccctcaaaaaaagaaaagaaaagtgtatttccctttagaggctcataggggagccatggggggagatttactggaaaatgaatatcgtaattacagtaatatgctaaaccaaagcttagcaactctatagctttatataaaacacttccaggtttccctggaaaagtcacagaagatgggtcagagttggtcaggacagcaggatggtgtggtaaaggacattccagcagagggtgccacatgggcaaagttgcagaagccagaacctcttcaaccagactgtgtcctctgttcccctgtgtctccaggcccaagatgacatctgctgcacagacatttaatagatggtttgttgagtgatggcagcatctataaagaaagagacattatttcattttttttgaaccagggtctcactgtgttgcccaggctggggtgcagtggtatgatcttggctcactgcagactccttatccttggctcaggcaaccctgccacctcagcctcccaagtaactggaactgcaggcacatgccaccacaccaggctactttttgtattttttgtagagacagggtttcagcatgttgcccaggctggggtcttgaactcctgagctcaagcaagcctcccaaagtactgagatgacaggcgtgagccactgcgccccatgagacattatttcattcattcaacaaatatgcattaaacacccgtaatatgttaggcatggttctaggccctcgggacaaagagtaagacaacgtccctgctcccatggagtttctacggcttcaatagatgccacagaggttgcacaagcaactgacatgataggaattctgaggaggtatagttaatccacatcagggtcatcccagaaagaactcaggatgaagcagccctgcagttagacccccccaggagatgaggctcttcctgcttctggttcctgatcacagggccagcctccaattcctcttatttgaaaacaaagcaaaccaaccagccaaactaaaaagatgtctgctggtgaacagttgccagacaacggaaagcaactaattggggtctttgctgccatgttttcctacgtctctgattcggtcagggtccctcgggagagagaagccaacccagatgggcacaggaggagatgttaatgaaagggatgacctgcagaggcgggctggggacacaggaaccatcacagggctgagggcctcagagcgagcatcactggggagccatgaccaccccaggcctgtaaaggcagggggaggaagagtcccatgaaccccatgagctgcagccatggagaaggggcctcatgacaggaggtgtcatcacggagcatccagcgttgcctggaagtagccccacacaggaagggagtgagcatggacatcttgcctcctgcctcctgccatccgatctcttgctaatgtctcccatgggccataccccaccgaagccagacacaagggatcctaggggcacagcccatgggagccagccttccagatgcaaagcagagaggggaaagaatacagaattaccagcaccttctctatgagcgaatttaccaatcttcccaagtttccttatttcaaccatagctgcttttggatgtgggaaggcacgaaccaaacaagctatttcttcaaatttcatgacccaattcgatttgataacagaatgaagggcttttattttcatagagctggcttattttctgttccctacatttctctcaagcagcatggtctccaggaggatgacctctgcagtttcattgacctgaaatctttgaaaggatgacactctacacatctcacaatgaaagcccaattgcagcctcccttggaaccgaaggctttagatgtgttctcacatctgaattttgctaataataactaaataccctcatcagccctcttcacactttctttcaattccattcagttgcagggttctttgctttgagccatttgtgactcgtttctgctgttcttccctttagcattgattggtttctgttcttgcacattacatgctccagccaggagagcccatttctcttgagtcccaatcagcttttcctatcagttagactgttggacctaaaacttaatgtattttttgattaatgcaataattctttaaagcaaactcaaaaattggctttaaattggttttaaaatattgaacaagctttacgttgaaactgctgggagtttgggaaagcagtgacagaagatcaatccatcacagactaacgagagtccagtcccgtttgctttccttgtttttccctgcttgttctcctccccgtgttccagttccttccgcgtattgcccctggaggcttgctaataactacacacttgctcttgcaaaagccacataaactggttctaggtagttgatgttcctctccctattcagcaggagtgcagactgagacttccagatttttagtggtgctctctaaagccgcagaagagatcaatttcagtggctatactttacctaagtagttggggatcagcaactgctctctctaatagatctacagtgtctgaggggaatgtgcccatgcctgcctaccaaccatgcctcctgctcaacattctaggcccagatcatgttacctcctcccagaagccatctgccctccccactacatcctgtaagctttcagacaactgtacattctgatacattcgtcacttgaaatatcgtttctctgtatcttcacaaaaagtctgggctttgttttgtttgtttgtttgtttgtttttgttttgattttttttttttttttttttttgagatggagtctcgctctttcacccaggccggactacaatggcgctatcttggctcactgcaagctctgcctcccgggttcacgccattctcctgccccagccttccaagtagctgaaactacaggcacctgctactgcacccggctaattttttgtatttttggtagagacggggtttcactgtgttagccaggatggtctcaatctcctgacctcgtgatccacccgccttggcctcccgaagtgctgggattacaggcatgagccactgcgcccggcctaaaaagtctgggctttgttagtggagggtttgtgcctgtcgcatcctgtatcctgcagtgcctggcacagagtaggtgctcattaagtgtttgttgaatgaatgacaaatccctccttcatccacacacctccctccctaccatgaagctgggtaagtacaggaaaagaatagacagtagcttcagggctggattatgtctcagtaatcttttgaatcataaaagaaaattagatttccacagtaaacctcagttccttccatctgcctcctaaattagaaaaataaacccaccatttgcttgggataaatataataatttgcttgggatatgcacttgtatcgtgcttgattacaaagcactttcacgtacaccatcttattctgaggcttatctcaagtttttgtgatagattttgtccataggcaagggagagggagggagagtggccacccaggggcatagagttgacaagccccagaccattattttacccaggtctttgggagctgcaccagccagcactgatgaccactccagtcccagtgaagcagaaatgcgcttccattgttcttactggtcactctgccttttgaaagagggggatgagtgggctgttgttggcttgtcaaacacaataccagggatggccaactcaaatgccaacagcaacacaacccttaaatgagtgaggcagagttgaagcctgcttcatggacctgtcaatattttgataaggatgcaaagataaatttcattttcttctgcttttcctattaaaacaaacagaacaacaaaaacacatcaacacaaaagcctgcaagcataatgacacatagccccatgctggggcgggtgggggtggtctgtggcaaactggagtgggcatggcttgttgtggggtgttggggagacacctgctacacagctccccagttcaggtccatgtttacccagcagaaatgtgagcccaatggtaccaggccttccagtgtgattttgtgatgtcagtagcataaaatccatgcgtttttgttaaatatctttatttttaaatgttgagaattaacatttttttaaatcttaaacacatctataagtggaattttggctgcaacgttgtgttacacttcctacattatgtgcctttgaacctcatttcaactgtgaatttcttataattagtggaaagaaggaagaagaaggatgctcagtacacatttataaagcaccttttattaccacgcatagtactaggcattttggatacaacattaaagatagacttggtgggaggctgaggcaggaaaatcgcttaaagctgggaggtggaggttgccactgcactccagcccaggcaacagtgcaagactctgtctccaaaaaaaaaaaaaaaaaaaaaagatagacttggactttggacttggccactgttctcatagggtttgtaatctagtgaagtagaaaaacagtttgacaaataattaaaatgttgtatgctaagaggcacgagagagtgttcaggatgctttggaagcataaaagtgggacctggccagttctccacggggttggaggaattgttcattgaaagaagtgaaatttgagacctacagggatgagctcttcaggcagggaaggaacttatgggtgtcctaagcaaagggacagggtgtgtaaagttctggagatgagcatgaatgacacgttcagggaggtggaagacactcccttgactgtgccataaagtgatggtggctgtggccacagactaggctggagacggagccaggaaatgaagggccttatcagccacaggcaggagcttgggatttagggcagtgagaaggcatctggagattttttaaagattgacgtcatcagatgggtgctttcgaaagatctctggctgtaatatgaaaaacacttagtagggaattgtaatagtacatgttttccaggaagaaaaccctgagctgcttgagattcgagtgcagactgtgtactggaggatgctgtggggaatcgcatgaagcagtttgaaggaaggctgaactgccgtgcagttgccacagcaggtcctagaaggagctctggagctggatgagccttctgagttgttgtgcatggacacagagtggtcaggccttacatccctatgcatagaccaggttttcgatgtgggcttcccgcagaaggaagaaaggctttgggtgaagcagctttcttcagctgggggcacttcccgggtagagacttggcagagagctgtctgctgcggacatacccagcagcagggatatcagtcctggaggaggggtctggccagcctcacagcatctgctgtcgtctgccccttgcactgcctggagacatttgcttgtggaatgagagagactggagaaatgtacaaatggaaggttagcagggtaaactatatgtagctcatgctgccacagctggtcttgaagttgcagctgactcccattgacttccttctctcctactcattctagattcccctcgcccttagagaagacctctaggtggcttacctggtggggtgacacagacatcatccctgatgggtccaggctcctgggtgccattctaaagccatgactactgaatgatttgctatcaacattgggcaggggaggaccaagagatgccacagtgaaccacctgggtgccaaatgcattcttcccatttaaataccccattctataactgcagccctgcctgctcctgagagtcagttaccccttccaggatggcaactccctttctagcctgctaatcccttggcaatgcaacataaagtgaccagaactcttgctgtgttctctggcaaaagtactctcttgctggaagccagggcccctatatatgcaaggccaggttgcacagatggagagcataaactccaagtggaccactgggagtgagaagtggggccgtccctacttccaccccttgattcctgaaccattgcgttctacctgctggagacacaccctgcaccatggtagttgttgattcagagtgtaaatctcaccttagaggatagcgcccacatcacagtgcagctccagcggcatcgtgcaagcctggtccatccgtctcatcaggtcaacagcttctgggcagtaggatgtgtgacaggaccagtgttcccatgggtatgcacccactgggacacaatgcagtgccatgcagggtgccggcagcctgcagatgctagtgctggctgaggctctgttgccaagaaaggcaaacccacacccagaaaaggagtcacttcctgtcaagatggagtgtcttcatcttccctggtgtcactgtgatccacctgacacccactggccagttagttggtctcctcgaggagtggaggacacacaggactccgtgccgctctttgttgccggcaggttgaatgttggcggtgtggcagatggggggatgcccgagctggggggcctggcagggcttcacctcaccaccacgcttcctccacacgggagtgccctggcccaggactgctgtggccagtggcggaggctggcagtggtccactggccggatccctccatctgcttgttgaagtgctctcctgtgagctctgccatgctgtgcaaacatgcggacatgtcctgcccctcccatgggtctgtccacgtgcctgctctgcagagctccttgtcttacctgtcctcagtcttccagattttctctgtccctgcccttaaagaggctgccaagacgtttgccactgcttaggagcttgtatctcttcctaactcaggactctttcctttccacacacagtccactgtcagctgctgcctcatctgtttgggctgctgtcactcaataccgtagactggctggcttataaacaacacacatttattccttccagttctggaggctcagaagtcaaagatgaatgcactagcagatttggggtctcatgagggaccactttttggtttgtagatgacgtcttctagctataccctcacatggtagaaggggcaagacagctctctggggcctcacaggatgagaggtgactggttaatgccctctctttataagggcactaatcccattcccgagggctctgacttatgacccaatcaccttgcaaaggcctcacctcctaatcccaccgccttggtgattaggtttcgacataggaatctggggagacacaaacactcggaccatagcagttgcgttgcccaaggctctgcttattgacagggtctcccctcaccactctttcaaccctaaagaggattacaggatagcgacagtgcatttttggcttgcagccgtatgttaagctaactcaattgtgaaccaagcttggatccctcagtgtgtcataaggaatctccccagcccggccactaccaccgtggggccatggttgtgagcccaaggagaggcagtcatgccacggtgtggatggcacgggggtctgaggacctgcttgtgcagctcgctcacgccccgtgggcctgcttgggcctgggcctagatgccccacttctgtcttatgacaattgctgcacagatgctccaactccacagggctcggtagcgtgccaggggctctctttcaaatggtccatcgttctcagctgctgaacccccaaaatctttgctgggatgctcttattggcccgcaggtagccccacgtgacctcttttccctccacagacacctggaatccacagggtctgcctgcgtgcacagccgcagagacagggcgcttgcatgccgcctgaccctgccctttgctcctcggggccccactcagagcttccagcactttcttccaacagtgacaggctcctctttggccactggcgggagggattccagctctaactccattttagagtttgcttcctaggactatccaggcaccaagtgccacaggttataggttcccaggagaacaggctctgagacttgcaggcagggagtgtcttggggtgctctcaacagcaccttcaggaagagaaggaagcagggttgggcagaggtggagtcccactgcagtgcggttgccacagaagactgaggggagccagaggtaggaggctagaggtgagcccttcgcatccaccctccaccactgggcgtgagctgccctatcgccgtgatgtgacggtgtgacctcagtcccaaggtggtgggactgggagcagagcagagcaccccctaaaagggccaaaccagagacacaccaggcaccaggaatccggccagggaatacagaggaggggatgggcttgaggtcggatctgcagaacttggcagtggattagaagacaggatgagaggagacgggttaatgttgatgcatgaatgtctagcttagaacgatggtggtgccattggctggaagaggagacagaaacaaaagcaggttgttcggggagacacacattcattgtggacatctcagctaggggttcagtggggaaaggagtggatgcctagaccacctcagaggagaatccaggctggagccagcgatcaagatgcaagactgacaatctccaacgaactgccccttatccatgctccccacacccacacccaccccttcagagttacagtccaggagaggctaggaggtgcacctccctcagtggaggacactgaagcagcagtggctccagggagctgagatcttttttgatctattttgccccagcatctcaccgcagagccgtctctcagccattgactgccttcacacacaaatgcagtcccagtattgggagatgggtgtaatttattattcccggagatctagatccccggttatttgggagtgtattttctgaactgcttgttggtttaagtaaagcaggtttgatgccacttctcttgaatccatgaccctggacccgccgcctaagtggatgtgcagatgggatggaacggctgcgacagatctccattaaagccagcgcgtcgttcgggctcggccttgcgctgtgaaaagctgagtcagtgccaggacagcacccgcccctctgcagtgcgtttccaaggcactcagcttgtgtgcgaaggtttgctctggggcagcagaaatggcccttggcaggtcgtcaaaggcccggtttcatttcctcctcttccaggcaagttgctcaaaggctcacagccttttcgtcgcctgccacacagagccagtaagatctaccaagctataaataatgaaatgagtgtgtgtttcgccgtttgtaagttgcaaagtattacaaaatggtgaaacttgggggtttgggtttttaaggctgaatgctaaaactgtcaggcactgtggagagaggaaaggaaagataagattgactgggattgaaagacaagtgaaggcatgcttgcgtgggtacacacacagtgacaccacacgcctgcccctggaggccgatcctgaccatgcagacctggggctggggctctccaagcgctctcctgcactgcagaaacccttcttctcttctggactgtcactccagcacggcagagcaccaaggctctgcaacgcacttccctggggtgcagcttccggccaggggcgtcctccctctgcaggagcctcagcacccccggggggttccctccacccccaggagttctgccttgaggggcatggcctgcgggtcccctgagctcgctcacctgtgggggtcacggcctgcgggtcccctgagctcactcacctgtaggggtcacagcctgcgggtcccctgagtcttcctctgcacggccacagtgcagcctccaccagatgcctgcctggcctgacacatgggaccctcctctgaaaatgatgctgtcctgaaggcttttggattccagaggggtttcaggatcccagcagagttggtaaaaaaggtctgaatgtaaattctgaaccgactttgcaagtctataccctgtataccctgtgtactagactccataaacaagcagctagaacaagttcgcaatgtggaaaatatttttatagaaacttattgtcacagctacacaccacacacacacacacaccacacatatgtcacacatgccacacacataaacataacgcacacatcacacatacacaccacacatatataacacacatcacacatacacacacaccacacatacatcacacatgccacacacatacacacatacacacaccacacacatgcaccacacacccattacacacaccacacacacatcacacaccacacacatgcaccacacacccattacacacaccacacatacatcacacacaccacacacaccacacacccatcacacacaccacccatatgcaccacacacccatcacacacaccacacatatgcaccacacacacataaacatacacaccacatccacatacaccacacatacacaacacacacggcgcacacatatacataacatgcacaccatgcgttacacacacaacacacgcgcaccacatataccacacacacatacatacacaccacacacactgcacatacagcatacgcatatacacaacacacatacacacagaacacacaccacacacagatacataacactgcacacactcgccactcacatacacaccgcataccccacgggcatttggagctcctcaaaggaaagcgcccctggcaattctctgcacaccccactcagtatcaggagggaagcagctgcagtgcgcctctgatgcaccagatggcgctaaacccttaaggaaaatgctggatttgtccagaaacaaaaataaaatgacctgggggaaaagggagtgaacgccactttgaaaggcaccccagccacgcctgcatagtggcccagccgacaacaggcaagagggaatcgaaggactgtgtccccaggaggagcatttctgagaggtgtgcagatttgaaaagctaacagctggatcctggcccccataattccttcattaaaaacggggctggcaggggggacaaaatattgtcactccacagaaaagcatgttgaccatgtgtgaggaaaacggttcacctgctctacacttgttccttgcaagcacagaggcatagcccgtttaaactcagcaccccgcaagcacagaggtgtagcccatttaactcatcacccctgcaagcacagaggcatggccatttaactcatcacccctgcaaagcacagaggtatagcacatttaaactcagcacccctgcaaacacagaggcatagctcgtttaaactcagcacccctgtaagcacagaggcatagcccatttaggctcagcactgctgttctccagggttgcatttaccttctttcagcaaggactaggtgttcccacccgtgtctgaggaatccaagacaagcagagggggcttgaagtcaaacagatctagtcttaaacatgagtttcagcctagctgtgatgggtaattttctgtgtcaatgtagctgggccacacagcccagttgttggaaccagcagtagtcaaggtgtcgctgtgaaggtatttttgtagacgtggttaacatctatactcagttaactttgaggtcaaggagatgaccctctataatgtgggtgggcctcacccagtccatggaaggcctgacgagcaaagacctcggtttcccagagaagagaaaaattctgccctaccgagtgtggtggttcacaccggcagccccacactttgggaggccagggtgggaggatcacttgaagctaagaattcgaaaccagcctgggcaacaaagtgagaccccatctctacaaaaaatattttttaaagatcagcagaggacagaagcatgtgcctgtagtcccagctactcgagagcccaggatttccaggctagagtgagctatgatcttgccacagcactccagcctgggcaacagagtgagaccctgtctcaaaaaaaaaaaaaaaaaaaaaatagggtctctctgtctttgttgaccacagtgtatgtagaccttctgcgagcagtagttctccgaagctctgcaggctagcgacatcggcatcacctaggaatttgttgaactgccagtccttgagcgcaatcccagacctatggattcagacccagaggggtagtgggggagccacagcacaagcgcttccggtgccgctggtctgagagccgccgttctgctaatggggaagctccacaaggcagggattgttggcttgctatttgtcatctctcttgtttactgggatgtatccccagggtccaggacagtgcctggcacatcttagacacccaacacatgtttcttgaatgaaaatatttctgcattcactctagcaaaaataatagtctactttgtgccagaataactatactttgcacaaaaggtaggctctgtggtcggctttgacccctctcacatcctattagtgatgattccgcattcagaatcccatctatgtggataattttggtcactgctgacctaagccaaccaaaaactagagaatgtcattatcaaaaatacaaatcagcatattttctagctcaagtgtagatttttcccatatgtcaacttgtaacaatagttgaacacaaagcacttttaaaataaccaataaatggtacctattaataattctgctacttaatatttatgttgttccatttcccccattaatctcaaaataggttgatagatattattttaattcacttcccctttaggaagcatttagggccccatggggcaagactctgtaagatctcgtctgtggcacttggcacacattccactcctagcagaaatcaccactgttagaatcattgtcaaaaatgcccttctgggccaggcatggtggctcatgcctgtaatcccagcactttgggaggccgaggcaggcagatcacctgaggtcaagaattcgagatcagcctggccaaagtgatgaaatcccatctctactaaaaatacaaaaattagcgaggtggggtggtgcatgcctgtaatcccagctactcaggaggctgaggcatgagaatcgcttgaacccaggaggtggaggttgtagtgagccgagattgtgtcattgcactccagcctaggtgacagagcaaaactccgtctcaaaaatagataaataaataaaaacaaatgcccttctgaattgcattctaaagcatggcttggggagtttggagcttagtggagtagccttgtattgcttacagtgtagccttgtattccccggagcccttggctagacaccccattaaatcccaacactctgatgatttctcttaaaaaaaataacaaaataggccgggcgcagtggctcacacctgtaatccaagcactttgggagacggaggcgggcagatcacctgaggtcaggagttcaaaactagcctggccaacatggtgaaactccgtctcctccctcagcctcccaagtagccgggtgtggtagcaggcacctgtaaccccagctacttgagaggccgaggcagcagaatcatttgaacccaggaggtggaggttgcagtgagcggagatttcaccattgcactccagcctgggcaacaggagcgaaacaacgtctcaaaaaaaaaaataacaaaatacatttaaatatatacatatatacatattctccaaaaagagatagtcataagacaatgtgagaacaacaaaacatgttttggtgacacccgttgccaagcagtaacgttgactagctcaaggcccctgaaaagtgatgccattttcttactcaccagcaggaggcgggctgctcacacgcagcagtgctcaactggcccacctgcttgactgagccaggaaggctgctgtctgcaaaggtggaaggtttcagtgtttgtgagaagagaggcgagcgttgatgagaaagctgacatttaaaagctgtcattcacctgaaagcattcatagctgaattaagccaactctgttttcatgattaatgacaactgctcttttttggaaaacaggcttaaatggatttttaggattagaatagacttgtctaattattggctacacaggtgtcacaaatgagtttctcttaaagcaggaaagataacacatatgcagttccttaagttattctagcttcaatgtatatcaatgtgtctcctaggcgctaattcggcttttttttttttttttttttgacacagagtcttgctctgtcgcccaggctggagtgcagtggcgcgatctcggctcactgcaagctctgcctcccaggttcacgtcattctcccatctcagcctcccaagtaggtgggactacaggtgcctgccaccacgcccggctaattttttttttttttttttgtattttgagtagagatggggtttcatcgtgttagccaggatggtttgatctgacctcgtgatccacccgcctcggcctcccaaagtgctgggattacaggtgtgagccaccgtgcccagcctaattcagcttttaaaacctatataagtacattttgatttaccagtggagttttgtgtgtgtgtgtgtgtttatagagacagggtctcattatattgaccagtctggccttgaactcctagactcaagtgttcctcctgcctcggcctcccatacttgtgtttttaaaggagatttaaggccaatccaggccttcagtggtcttttccatgtgtacaaactcccacagggtcatattcccatctctttagagatgatcgtgatgattacaataacaaagtaataatggtggtgatcatagaaaacacacggttagcattcagggtgcacctggctctgtgctaagccgtttgtgtgttgatcttactcacgatgacccttgtgaggttattcctcttgagccacagatggacgatcatgcctttacctttctgagggaattttgattctctctgtctctctctatatgtatatgaaatatatttcctataatcatatgaaatatatatatgaaacatctatatataagtatattatagatgtttcatatatatatttatgaaatcgctattttcagccatgaagtatattaggagagagacttgtcctgttccacccccacctccaccacgcgtgcgtacacacatgcatgcatgcaattcctcctgccacgggtgagcagtagacaggcacagaattctatgcaattacctaacagttacactgccccgtgagagccacactttattgcacaatcgggcggtgatgctgaatcacaacaaaaccttcccctcctggcaacacaataagcaggcattgctttagagcttgatgactaaggcgggaacagagggtaagttacccagctcaccatgttcctcttcaggcgcaaagggagaatcgccctccagaggatgaatggttcccaaacctcccgcccctcgcaaccccttagggcatttttagggattctaatttctgtaccccgccacagacctactgaatcccaatctccagagtctggacacaagccttgggatcatttttagaatcgctttggtgatcttgaacctgtgggcacccagccactgcttgagatcactccagaaggatttaaacatcagcattaagacactcatgaaggatgcaaagcaaagatgtgctcctcctggtagaaatcccctctcggaagtggcagtcaaaggtctaaaccagtggcctgggcaccgcccactcccggggtgtcatagagctgcttctcctgccccccaggtccctggggctggcagcagtggcagcagtcactgggtctgggactcccctccctccccgtggatccgctgggtgaggataggaagcacaggaagagctgtgatgctgagaagggcaggaactccaagggccttcttggtgaccctttcccacatgttaggtgcagtgggacagttggagacaatgacaaagaaagggcatgagctttggcagccgtggcctcctggtgtccttcttgaaagcactttcggcaggttggggaagggagaaccggccaggcagcagcgatggcccagggcagaagggcgggtgggcagctgggagtggagttgcagtgctggtgccaggggaagcaggcaagtggagggcaggtgagccactgcagtgaggggaggggggctgggtggcttctcccactgtctttaccacaagctgggtgctggtggtggtggtagttgctttcgttgttgttgttttgagacagattcttgccctgtcgcctagtctggattgcagtggcaccagctcggctcggtgcaatctccaccttctggattcaagtgattctcatgcctcaacctcctgagtagctgggactatatgtgtgcgccaccaggcccagcatatatatatatatatatatatatatcaagactgaggttgctatatatatacacaaatatatatacaaatatatatacaaatatatataaatatatatacaaatatatataaatatatataaatatatacatatatataaatattatatgtatttttagtagagacagggtttcaccatgtttcgcaggctggtcttgaactcctgaccgtcgcactggcctcccagagtgctgggattacaggtgtgagccactgcgcctggccacaagctgtttgaaaactgtgctctcaaaagtccccggggacttccagatctccatgacagcatcttagccttagtcccttagccctctttgtagcatgtgacttgataatgacaggaagaaatcaaggctgcaggggcctggagtatgaacccaggcagctcggggctccgattctgaaccgactgctcgcaggccaggcggcctgggtctgaagttatttagttttctgagactgatctctccagctgaaatagttaatgacaagctccgtccttcagggatgcgcagttactacattctgtgatgtgggcagagcccctgccgcacagtgcccttcctcatgtaacagaagcgtccttacttcttcaaagccttcccctcctgggcagcagggtctcggacccgccggccgcccctccctctaacaccctgcagctgtcccagcgccatgcctacacagctctgtgttagcccgtgccgaggtctgagtcatcagattaatgggaaaatcagcacaagtagcgtttgaggaacagaatgccatgtcgttcattgggaaaggaatgctgaactttgacttctaagttagataacagaactgcttcatgccctatggaggaataaaaccataacctttgagcacatactgtctaccagaaaaaaaaaaaaaagaaaagacacatcttattagttttctacaccgtaacccctaactctccaatcaaggccaagatctgcctgggcccttgacagtcccaggaggtcagcgtgaaccccacccccactgcaaaagaaagtgggtagctgtcctgccggctaaaacaccctcccctagcttggtactgttaaaacttcagacacggccgggcgcggtggctcacgcctgtaatcccagcactttgggaggccgaggcgggtggatcacaaggtcaggagatcgagaccatcccggctaacatggtgaaaccccgtctctactaaaaattagccgggcgtggtggcgggcgcctgtagtcccagctactcgggaggctgaggcaggagaatggcgtgaacccgggaggcggagcttgcagtgagccgagatcacgccactgcagtccagcctgggcgacagagccacactctgtctcaaaaaaaaaaaaaaaaaaaaaaaaaaggaaacaaaaaaaccccaaaaaacttcagacacattaaatctagcagagtttaattgagcaagaaaaaaaacaaaaaagcgattcgtaaattgggtagccttcacaattacagcagattcagagagactccaagggtgcctcggggtcagaacaaatttatagacaaaaagggaagtgatggacagaaatcggaagtcaggtacagaaacacccgggctggttacaagttggtgtcggcctcatttgaacacagtttgaacactcagcagtgtatgagtggctgaagcatggctgctgggattggccaagacccagctgttgttacagttgcatactctagagttagactttcaatcttgtctacatattaagtcagacacactcctaagttgggttttcaatcttggctaagttcgaccacaaggactcaaatacagaagtacggagtccttcttaggccatacttagtttgctttaacagtattaaaaaccattttgcgacatcagcattttggtcttttcctagggtttggggtattttctcttccctaggctttcttctctgtctctgaccttcagtgtgggcatctccatgagggggtccttgactccttggctcacgtgtgcctcggcccctcagcagctctggtgtcctgtggacatgagggtgcctcttaacccacgctgctgcccatggcttacaggaaccaaagctcagcccaggaagcctcaacctcaggctctagatctggggaggtctctcttcctgcaaactgctggcatctcactgcatcttctcacagtggaagaggcaagagagctctctggggttgctttaataagggcacgaatcccttcataagagctccaccctcatgacctaatcacctcccaaaggccccaccttccagtagcatcaccttggtgggtaggatttcaacatatcgatccggggaagaagtaacattggcccagttgcagagtctgtgaaggaaatgataagggtacatatccttgcaggtgaaaacagaaattgctgctctcaattttccctcttccagtctaaggatcaaaccctcctagctacctccctctcccctgagtgaactggcccatccagtagctcagtgcacactagtgtggaaatgtttacacgggtagtcttttgtaatcactcctaggtattaaacttgcagtgtcctgatttgaaggacgcttgctgctggaggtgttacatccagagccgtttggggaaatcctagtggctttctggtgggcctgcaagttatacccactctgccttgtgtgctcgggggatcggaagtcagagaaaattggtattttgaaaagtaattatttctcttcttttgctgtaactttaatctttcttcctggacagaacaaagcatattaatataaatttgcaattttccagtttgtaattcctctccagtaatgtgctattgacaggcaggaggtttcttcaagttgagctctgaatctttctcttgggctgagtataacatcctttgttagaataaacattgtattcgcccagttgaaaatgctcttaacttggcaacatgtaacaaaggctttaggtgtgcacacacctgagccagaaacttcagcccctgagtgctcctcttgcagacaaggcctcccagataagtgctaagactctagagtttagcaagacctgccctcaatgataatctgtccacacgggttgggagtgctgggatatttgcagtcatttctgccattttattttatactttctattacattctacatttctatagttttacttttacttcttgcctttcttttgactcttttgtttgccatttccactgtatttttccttgtttagaagcaaattgctttctcttgtattgattaccctagaatgtaaacatatattaatgtaaaaaaatctaaggaccctctgcctgaatcatgccagcgcattagaatcatccaattctcacacttctgtgctattcttgtccggcatctagttctactctgattttttttttttttttgagacaaagtctcactccgttgcccaggctggagtgtactggcaccatctcggctcactgcaacctccacctcccaggttcaagcaattctcctgcctcagcctttcgagtagtgtgggcaccacacccagctactttttgtatttttagtagagacggtttcgctgtgttggccaggctgatcttgaactcctgacctcagatgatccacccgccttggcctcgcaaagtgctaggattacaggcgtgagccaccacacacagcctacttggattttttttttttaaccagcaaattaagcatcgtttacagttttagacaatcagtatttcctgtgatttaccatacgttacccattttctttttcttttctcacagtttcttcttgcagctcctggctccttctggacttttcctatttccatgtttcttttttttttttttttttttttttttgcggggcgggtggtggcagatggagtctcgttctgttgcccaggctggagtgtagtggtatgatctcggctcactgcaacctccgcctcccggttcaaatgattctcctgcctcagcctcctgagtagctgggactacaggcacccaccaccgcgcccagctaatttttgtatttttagtagagacggggtttcaccatgttggtcaggacggtctcaaactcctgacttggtgatctgcctgccttggcctcccacatccatgtttgtttgtttgttttcttttctttttttttttttttttttgagacggagtctccctctgctgcccaggctggagtgcagtggcgtgatctcggctcactgcaagctcagcctcccgggttcacgccattcttctgcctcagcctcctgagtagctgggactacaggcgcccaccaccatgcccagctaattttttgtaattttttgtatttttagtagagatggggtttcagcatgttagccaggatggtctcaatctcctgacctcatgatccgcctgccttggcctcccaaagtgcttggattacaggcgtgaaccaccacatccggccccaaatcatgtttctttaatgaacttctgttgatgggaaatgctgttttttattactgtgtttttatttatgctcattcttaaaaattaattttgcttggatagaattctaagtgggctggtattttctgtcagtgctttgaagataccatcactgtctgccagcacccatgcattaagaaatcagctggggggaataattgtaacttctttgtagataatttgtgtgtttttttgccactctctccaaacactgtttctctctcatgctctttgttatctccttccagaactctacttagaaaaacactggaccttctcaccttatccccccatctcttaatctccttttcatattttttacttcttggcattttatgtaatttcttcagctccatctttcagttcacaaattctctcttcatttgtatctaatttgttatgtaactcatcaactgagtttctaattttaattattagtgtttcatgtccagaaaaatggacaaaacaaagaaatttgtttcttttttacatctccctggttaattgtgacagtctcttattccattatcatcacctttatttatttatttaaatataacaaacatatttagtttatactcagttaagtttttttgagacagagtcccactccatcaccgggactggaatgcagtggcaaaatctcggctcactgcaacctctgccccccaggttcaggtacttctcctgcctcagcctcccaagtacctgggactacaggtgcacaccaccacgcttggctaatcgttgtgtttttagcagagacgaggtttcaccatgttggccaggctggtcttgaacacccggcctcaagtgatccacctgcctcagcctcccaaagtgctgggattacaggtgtgagccaccatgcctggccagtactctgtctctggccattccaatatctacaacctttgctggttagattctgtagtttctgtaattctgtgactttcactcatgtagctagttttctcctgtattaggtgactttttaacttttttattatgatcccagatttcttagaattttatttgtgtaatttccttgaggtttggctttttaaagtgctgtgctccacaaaagatatttttgcttccgcctggttccagggtatatgccaatctggtaatatttcaaattaatttttgacttgaggttttttaaagctaatcagataggatgaattcttttcaccaaccctcgtgtccgaggcctgatggttaggaatgttcagaaaaatgttttccaaacctgctgcctcacagaacccagcctgagaccagcacatatctgtcaattatctcttcagggcgggcttttgccctggcttcctccactgagaacgtcaccctcaggagtccaggtcctctgtgtgtagtaaaactggattccacctcccacctggctctggctggaggctttgtctcctgcctgtgcccttagggcctgggaagacccagatgatgggcagcgcgggactaagaagatagccccacagcaaatgccaggttccttcctcccgaaccaggaggatttgctgtctttaagggtttcctttgccttcccaccctatcagccgtacgtttaaaaaagatttttttccatatttgatccagcatttttaggtgtgtggacctgggagaaattgcccttcacatgcagtatgccatgttgctaaaaaatggcattttgaaattattttctgataagtaaaattgtatttttctccaatttgtatgacttaccaacttgccaccaacaagcaatctaaaccattgctgcagagctacagagccctagacctgaaaaagaacagcgtggaacatgaggccggggtggcgttggggtgcaggtcggtggggggatgggtgtttgccacgtgtcactgacggttaggaccacccaagactctgtggtgactggaaggcgtgccatgaagatgcatacctagttaccaagttgtgaaatggccctcactaaccacagcgccctcactgggcctctgccgtgagtggatcttagcaaaggaagcactcattgacctaccgttgcctccgagcagctgactccacgttattctagcaaagtattcacaaatcacgtgacaccctggcagttctcaagggtgtttcctttgtgcccatgatggctcattaacagaaacgaaattggcttcacccagtgaccagccctaggcaaagcttgtctgtggtgcccccaccactgtcagggataccacccatgtgccctgcccatttcacggggtcctattttggatgtttggtaacccctgaaagtttagtggtaacccctgaaagtttggtaacccctgaaatttggtaacccctgaaagtttagtgccttcctgggctgcgtcattcattcattcacttgcctgaaatgtactgatcgcctgctgtgtaccagattctatgccagaaactggggatatgaggatgtctcaaatgtgatcttggctctggaagaattgactttccacagaaataacagaaacatgaacactaattcctaaagaaactattaaatgcagtacagttattttcctcataatacttcatctataaagactcaaaaactttaacatttcaaaaaggcttggaattcgaaagtgaaatgacaaagtttggattcatgtttttggtgatgctgcatcttatctggggataatcagcgaatggctggtccttaaggtcacagatgtcaagcacagctagcccaggacctcttgcttccacccccaccagaaaacctccttatacatgatggtgcaggcagcacccagctctcggtgacatgaataatgtcagcaaatgtattaaaagcttgccacactggagtcattctgagtctttgaagaaattaactcatagaatcctccatacccccaatgcacaaggtgtttcatctgagagataaagactgtcagagagcttagggaatgtttccagagtcacccgtctgggtagagctgggatttgaaccagacagctggttccagggccacagtcttcactcacagctcccactgccctctctggcacatcgacttcatttcctgttcttgctcctgtcccttctgtgacaacatttggagttccccatttgccaggtgcaaggaaggataacaagatgtagagcaaagtttaaaagcaaagattccagagtcacactgatactcccacttaccagctttgggccatgttttcacccatcgaatcctcaatgtggaataaaaactagatcctcacttcacatctgatgaagtgtctaatgagaagtgtatttgagcattgatcaccttgcctgcattttaagcacctgataggtgttatttattacaattatgcaaaacaacagaatagaggagctcacactacaaaaccaaacaatctcttccccgctcctacgcatacgccacatgccagggagagtgtccccatccgcctagtagctgtctagcatttgtcaagtgcattgatatttaggcttcttgcccgaaggcactcctgtcttcaagaatttcctgtaccgacgtacagggaacataaactctgatcccagtaatagaaagctgagattaaacgcctttcctctttgtttccccaggcctacagagtcgatgaaagagccgccgagcaggctcgttgggaagcagcctccaaagaaaccatcaagaaaaccaccaagccctgtccccgctgccatgtaccagtggaaaaaaatggtgagtctgtgctgagcagagaatgaggatgtcgtgtgctctttgggggagaatcatacccatcagggattccaggattaaaggagatgctgtctgaaggtgcctggtgtgttgggtaacccctcgattaatgttacccattatcactattattattgtttttgttacacagaaatatttaatgagtgagtagttccatggctatgtgaggcacacagttagcatttatgtggttggaaagggaataaatatagaaactagaaccaagatatggaaagtggttgaggataagtggcagtcaggaggcagctgtggtttttctgtcctccctggtgaccttccccagcgctgatggctgcaccgtatgaccctgttgtctgccggccgtcagtctgtagccttccccagctttgcaacattattcaaaattaaaccctcgtctatatttaaagatccctgtggcctgcccctgatgactcacagtaccagtgggggacttcctgctgtctatcctggacatgccactcagggcaaagccatcacaaccagtggtccgagagccctttctcaatgtgatgcacttgtacgtgtgcaaggcagagtcagcggcaccatcacagatgagcaatgacacgaagccaggcgcagcctctcccagcttctccttaatgagcatcagctacgccctggctggcaggttgcccagagctgacttgcgggagggaagcccggccatcccaggatgggcactcaagcctctctcttttcagttatgtccttcaggaagttttcattaatacaaacaagacggtgcttgaacacatcccagagccgcaggtgctggcttagctcagtacaagtccttagtgctgtatcagtggcttcctgcagagaaaataaataatttacccagcgtgtccttattactccattgcatgcagcagtgctcctagaaaatgaagggattggcatgcacctataaagagcagaaggcggccgggcgcggtggctcacgcctgtaatcccagcactttgggaggcggaggcgggtggatcacaaggtcaggaggtcgagaccatcctggctaacacagtgaaaccccgtctctactaaaaatacaaaaaattagccgggtgtggtggcgggcgcctgtagtcccagctactctggaggctgaggcaggagaatggtgtgaacccgggaggcagagcttgcagtgagccgagattgcaccactgcactccagcctgggcgacagagtgagactccatctcaaaaaaaaaaaaaaaaaaaaaaaagagcagaaggcactgatgggatggaaggaaagagcttctctagtctccaccaccactgggtgcactgggaagtgggagggaaagaacacggaagggcccttcccaggagaagatatgtgatggtttgggataaacaggcctggtatttcgctgacaagggtgtaaagcacagagattagacagtcttgatctgtagcccaggctggggtgcaatggcgtaatctcggttcactgcaacctccacctcccgagttcaagagattctcctgcctcagcttcccaagtagctgggactacaggtgtacgcaacacacccagctaatttttatattttttagtagagacgggatttcactatatgtcggccaggctggtctcgaactcctgacctcaggtgatctacccgccttggcctcccaaagccaagctgggattacgggtgtgagccactgtgcccggccttaatttttgtttgttttgttttttaataataattctcaaggttggtgaggacatcataagttagcgtaacttttctggaaaccactttggcaatacctatataaagactttatattatttgacccaataattctacctttgaaaatctatcctaaaggactaacctgaaatatataataggcaaacacacccacacccccacacacattttaggaaaaaaggtgccaactgcagcattatttatattagcgtaaactgaaaatcatcgaagtgtctaaaggcctcagtatgagaaagattggtttattttgtgataaatcggtggtaaagcttcacacagcccggcactgcagtgttgcaggagttaggactctgccatggactgtggctgtgtgagcaccagtttgctcgttcataagatgggtttcaatgggacttcctcacagcatgggcaggaggagtaacagagacggtgcatcaaacacgctccgtgagacgtgctctgattcgtgtggatgaaggttatgaaggcatggcggaaaggtttacatccatcctcagtgagaaatcagaatttcaaagcaagtggcacatatgtctgttttgaaacaaatgtgtgtgtgggaaaaaatagaatcagaagaaaaagactggaaacaagatgttaccatgtcatagtgagtagctctaggcataacaggaccaaagaggactttatttctttttatgcttttctgtaataaacatgtgtgacgtataaccttagaaaattagtaaaaatcagccaggtctctgtctgcagtggggagggaaaggggatccttaaacacccacccatgttcccacttctggcaggcgtcacaggcacggcaggtggagaatttacccagcaggtctggggtccatgccttagtggcctcctcggtagcccagactctggtggtggcagtttgcaagataagaagtggtcagcgaggctgggagtggtggctcacaccggtaatcccagcactttgggaggccaaggcaggcggatcacctgaggtcaggagttcgagaccagcctggccaacatggcgaaaccccgtctccactaaaaatagaaaagttagctgggcatggtggtacatgcctgtagtcccaactgcttgggaacctgaggcaggagaattacttgaacctgggaggcggaatttgcagtgagctgagatcatgccattgcactccagcctgagtgacagagcaagactctgtctcaaaaaaaaaaaaaaaaaaaaaggaagtggtcagcgaacctggacctgttgctttctgtttctctcctccgtggttgtttggttcagcacttactgtcggcttgtggggacacctgagacacttcacctttgtgacacataacatacagcccagtcttgtggccttaaatactatccacatactgatggctcccaaatctacaccccaccctcatctcgcccctcggtccgactccaatagccagctgcttccttagtgtctccactgattgttcaatggacagctcaaatttcacaaagcagagtgctagctgctcctagaaaaccttttcctctagggtgcaccccacctcagtcaacagcaccgcccagttcctcaagccgctaagctaaagctcatccttcattccatgctcttcctcaccctgcattcaatccccggtcaccacggccttccccgtgctctgatccagcgtctgcccacctctgactccacgtccccagccagtgccctgcttgcccgcctcctcttccaagcacagcttcccaaaagggctctcgcctccactctcgcatatttatgatccgtcctctacatagacgtgtagacttctcaaaggccatgtcagtcctgcccttccccccgggggtccccactgacattgcaaccacacagtcccgctcctctccccaggacgcttctgtgtcgtcactgcccatggctggctccttcctgtccttcagatcttaccccagctgacctcttctcagtcagaccgccccttaccaccctgccaaagacccctgccctcctgttggggggcactgtcaacaccatcccatctctcgagggggaggcactgccattccctctgcagggggcctgcctgtggatggccttgagccctctgggaaatcacctctgccaagacaattagttctggctccctccccttccccggagagctcatgtcccatgactactggttggtcataatacccaacccactaacgaaattcaggaccaccctgagagctgccccatccccagagctcctggacgtcagctcaggcctcttaggctgtgcccgagctgggcttctcctctgcccagtctgccctcctccctttccatctcagtgtctgcttccccctttacccaacgagtcccacccaccagtttaataataatttcatagcaccacttccttcccagatcattgcttaatttgttcatttacatgttccccatctgtcgctctttagaacataagccggtgagatcagggaccttgaccgtctaggctccaatcccagaagagagcccggacaaaaaatatttgctgaattaaaacttagcttgtaggccgggcgtggtgactcacgcctgtaatcccagcactttgggaggccgaggctggcagatcgcttgagttcaagaattcaggaccagcctgactaacatggtgaaaccctgtctctagtaaaaatacaaaaaaaaaatagctaggtgtggtggcaggcacctgtgatcccagctactcgggaggccgagacacaagaattggttgaacccaggaggtggaggttgcagtgagccaagattgcaccattgcacttcggcctgggtgacacagtgagactccgtctcaaaaagaataaataaaacacaaacacacaaaaacttagcttgtaaagtttagagatatacacataaaccgatctttttaataaaataacatagaggaagcaagctatcagggcacacagacccggaggaggaggcttcctggaagagatgataccagccaagaattgaagaatgagcagatatgagcaaggcaaggaagagcaggaggaggcgtcctaggccccaggactgcatgagcaaagacaccgggtgtgcgcgcgccggtgtgcggaggcagcccctgctgctcgtgttccaggcaccgcacgcaggagcctcagctgaagcagtaggtaggatgcagaattgaggtccctgaatggcaggtttggggcttggacttgatcctgtgaggcaggcagatattctaggatgagaagcaggaaaattattcatcggatctgccctggactcagaacatgctggcagcctccaaagatggagttgtaggagtcaaatggttcgtgactgtaggaaagtttctccctgtcgggctatttcttggaaatattgtgatgtactataaatgaaagcactaattttttacctccaaatttttaacttacaaacagaaaagctgagacttgaagcttattagcgatggcctaaactgtttaaaagtgcatcactgtaaccgaaaccgacatagcctctatgaccaaggatgttacctggttgtcaccaaggttcgtggcctgttacatactcagctgtgtttcaggaatgcccttcctccctcagagaagctgaaatgagaatgcgaggaatttccattttaagcacaggctaaaccctggtactttctcctataatccactccagtctccagaaatttcttcacttccatctcaagcagatgaaattctggctccattccctgactgagtgtgtgcttctcctcaaatgtgccttcaggttgttcagggacttccacgctctcattaaatctagtggaagaattgctggccggagccacgatgtcgactgcccggcgtaggctgagcttttcatggtttgagtgtccatctgcagacagaactcactacaaaggaagccatattcccttcatgtctatatccacaaatctgcgtgaagtttcagctgcttcctggatgcacttacttttaagctggcaaagcttttagaattgcggtcctccatgctcctccatggcctgggtctagctctatggccttgtgtatattaagccctagggagaaaagaaagctaatgacgtgaatatcttctcttcccatttccattcttactgtaccaggccattgtaattctagcttctgtaccaagatatcatttacaatgctagtatcccagattcattaaatgcttggtattaatttttggcattcggtctaagtgtagaacaaacaacatgcttcttctattctctcattcaataacaacagtcagcacagaagacttctgtgacggaatgtgcgggggtttttccccacgcaccaagcaagcaatcagttctgcagtggacaccggctgagtgtcctgctcttcaaccctggcgctgtctaccaggaaatagtgtctgatccctcaggctgggggctcagtcccacaggactgccactcaccggtctcaagtctgggcttccggaagttctgatcgactggcttcaagttgagattcccatgactccctctttgggttctgttatttgctacagtggctcacagaactcagggaaacacatttaccagtttattataaaggatattacaaaagatacagatgaagagatgcagagggcgaggtatgggggaagggtcgcggagcttccaagccttccctgggtgctccgcccatcagaaacctccatgtgttcagcaacctggaagctccccaaaccctgtcctctggggccctctatggagacttcctgggataggcacgatggaagcatggacagccgtgttgaaatgcggtgggacagaaaggctttgatctcacgctaaaagatggagtggggagaccctgcaaggcctgccggtctagattcttcttggcctccctgtgcagcattccttcctccaggggatggacaggactctttctgaaatccgggtcttataacccacagtcagaacagctgcggatggttccagtcctgccctgggctggtaaaaggagggcaaggaaaggtcggagggagagattctcttttctggcgcctgtttctgaggcctgaattgccccaacattatgacaaaagactgtaacaagagctatgggagttataagccagggactgtgtatgaaaaacacatctatcagccaggcgcggtggctcatgcctgtaatcccagcactttgggaggccaaggcaggcagatcacgaggtcaggagtttgagaccagcctggtcaacatggtgaaaccccgtctctactaaaaatacaaaatttagccaggcgtggtggcaggtgcctgtaattccaactactcgagaggctgaggcaggagaattgcttgaacccgggaggcagaggtggcagtgagcccagatcgcgccctgtactccagcctgggcgacagagcgagactccatctcaaaaaaataaaataaaataaaataaaatatatatatatatatacacacacacacacacacacacacacacactcttcatacatatttgtgtttatatatgcttatatatattaaatatcacaataggaaagtttcttaccctttcatttagaattgctttaatagttcattaagttttaatgtattgctcaataattttgattgaatatattttacgatacatgatataataatgatatatttatgatatgataaaatatttatgatattttagagaaacaagtggttttataatgtcacaccatataacatattatttacatcataaatatacaaccatgcaatatgtgctgaaaatggcacaaacctaagtggaaagtatgaagataaaagtgttgtaagttttctcctttattttccacagatctgtaatttatgatctttaaaacaagccagaaaggattaggaaaacaggagattttgcatgtcggcaagttatcttaaaacaaatgcctattcctatatattcataaatattttaaattagtgaaagttctcatgccaggtttctaataataaaagtgagacagcaccgaaccaattacttggaaaatttggcaggaaaaatcaattaacaagataattggtaagagtgagtaatggagcaccttcaacgctaggtgggattcaagcaaagaaactgcgtttgccggggttttccaggaaatttggacagaaacagttctctgtacatcctcatacaaatcacttcctcctcccttcagttcccccacagcgactgaagcagggctgtgtgcactccagaaactcatggagtctatgtttaacaagtgagggaggtgaataattccaaaataagttccaagataagggacttttcctcttatgctgaaaataacctgttctgtgaatgacaggacattggaatcacacagaccttggtgagatcattgtcttcaccatttaaaagtgcttcaccttggggaaattctatagcagagtgatgctcttatctcaaagtgctttgggaagcaaatgagataatatacatagaacacctagcattattaattacttcctttctatccctctcatcttaattaaaattttggatagcattaaggaacatattccctattaaaaataatatgctggctgggtgcggtagctcacgcctgtaatcccagcactttgggaggccgaggcgggaggatgacttgaggtcaggagtttgagaccagcctggccaacatggcaaaaccctgtctctacgaaaaattcaaaaattagctgggcatgttggtgggcgcctgtaatcccagctactcgggaggctgaggccagagaatcacttgaacctgggaggtgggggttgcagtgagccaagatctcgccactgcactccagcctggacgacaagagcaaaactccatctcaaaaaaaaaaatagaaataataataattacaatatgctatcccagttcctgttttatgaatttggccaagccaagtaagtggcactatagaaagagcaaaaataaatcaaaatatatttaaattattatacattatattaggttatatcatcaaattttatcaatatatttaaatataaatatatttatatatattttaaatataaatatataaaaatatatttatatatattttaaatataaatatataaaaatatatttatatatattttaaatataaatatataaaatatatttatatatattttaaatataaatatataaaatatatttatatatattttaaatataaatatataaaatatatttatatatattttaaatataaatatataaaatatatttatatatattttaaatataaatatataaaatatatttatatatattttaaatataaatatataaaaatatatatattttaaatataaatatataaaaatatatatattttaaatataaatatataaaaatatatatattttaaatataaatatataaaaatatatatattttaaatataaatatataaaaatatatatattttaaatataaatatataaaaatatatatattttaaatataaatatataaaaatatatatattttaaatataaatatataaaaatatatatattttaaatataaatatataaaaatatatatattttaaatataaatatataaaaatatatttatatattttaaatataaatatattaatatttgaatatatttaaatgaggaattgacccctatctatgaaacatgaagtgtttgtctctaaatcccctttcaggagaataaagtcagatttacaaataaaatttgttcccgacaaaagtgacatgcttcaatttcattcatttcttaatgaatatcatcactttagagctgccctattgtgctttatgaagtttttcccctcagttaagtttctctctgcccttgtattgcttgtgattattcgctcagaaagtgatgtctaggctagcgtgctggtttgggaatgcgtgttttccaggtacttgctgcgaacccaccacacctttgttttctgcccccaacaggaggctgcatgcacatgaagtgtccgcagccccagtgcaggctcgagtggtgctggaactgtggctgcgagtggaaccgcgtctgcatgggggaccactggttcgacgtgtagccagggcggccgggcgccccatcgccacatcctgggggagcatacccagtgtctaccttcattttctaattctcttttcaaacacacacacacacgcgcgcgcgcgcacacacactcttcaagtttttttcaaagtccaactacagccaaattgcagaagaaactcctggatccctttcactatgtccatgaaaaacagcagagtaaaattacagaagaagctcctgaatccctttcagtttgtccacacaagacagcagagccatctgcgacaccaccaacaggcgttctcagcctccggatgacacaaataccagagcacagattcaagtgcaatccatgtatctgtatgggtcattctcacctgaattcgagacaggcagaatcagtagctggagagagagttctcacatttaatatcctgccttttaccttcagtaaacaccatgaagatgccattgacaaggtgtttctctgtaaaatgaactgcagtgggttctccaaactagattcatggctttaacagtaatgttcttatttaaattttcagaaagcatctattcccaaagaaccccaggcaatagtcaaaaacatttgtttatccttaagaattccatctatataaatcgcattaatgaaataccaactatgcgtaaatcaacttgtcacaaagtgagaaattatgaaagttaatttgaatgttgaatgtttgaattacagggaagaaatcaagttaatgtactttcattccctttcatgatttgcaactttagaaagaaattgtttttctgaaagtatcaccaaaaaatctatagtttgattctgagtattcattttgcaacttggagattttgctaatacatttggctccactgtaaatttaatagataaagtgcctataaaggaaacacgtttagaaatgatttcaaaatgatattcaatcttaacaaaagtgaacattattaaatcagaatctttaaagaggagcctttccagaactaccaaaatgaagacacgcccgactctctccatcagaagggtttatacccctttggcacaccctctctgtccaatctgcaagtcccagggagctctgcataccaggggttccccaggagagaccttctcttaggacagtaaactcactagaatattccttatgttgacatggattggatttcagttcaatcaaactttcagcttttttttcagccattcacaacacaatcaaaagattaacaacactgcatgcggcaaaccgcatgctcttacccacactacgcagaagagaaagtacaaccactatcttttgttctacctgtattgtctgacttctcaggaagatcgtgaacataactgagggcatgagtctcactagcacatggaggcccttttggatttagagactgtaaattattaaatcggcaacagggcttctctttttagatgtagcactgaaatccttgctggagggaagagaggggatgaactcaagttttccacatcctgggacacctgtccctcttttcctaactgcctaagataacccatttcttccaaccatctgaggacagtcccgtcgtctcagaggccctgcaccggggagagactgggctctgcagcagccacatcagcattcacagcttcatgtggcttcactgtctgaaaatctaccgactccaacatggccccacggtgacaacagacctgtgacaggaagcccaaagctcacatagaaatggtggacagatcaaagtctctatagtaagggaaaaaaagagaggtggcaggcatgagccccctgcacccagtggctcgtgtccatactgagtccagaccctgatcaaggcctgacttagtgtcactggcagtcccactaaattacacttccttacactggcccgatgcgacaaatcaggtggctcccttctgtcacgtggagcacacagtgttttccatcatccatagctttcttcctgatggtgtttgcattattgcgccttcccaatctgcatgctgcgttgggcttgcggtgcctgaacaaggtttgctcccatgagctcaggcaccctaggatcccctgttagactattaggctgtccagcatggtctcctttcccttcttggtggtggtcttttccctttccagaatagaacagtgattcttaaaataagttagagcaggccgggcgcggtggctcatgcctgtaatcccagcactttgggaggccgaggtgggtggatcacgaggtcaggagttcaagaccagcctggccaagatgatgaaaccccgtctctattaaaaatacaaaaattagctgggcgtggtggcaggcacctgtaatcccagcttcctgggaggctgaggcaggagaatcacttgaacccggggggcagaggttgcagtgagccgagatcacgccactgaactccagcctgggcaacagagtgagactctgtctcaaaaaaaaaaaaaaaacaaaaacaaaaaagcaagatcatccactacacatgaacatgaatcacagtattatttgcacaggaagggtgtaacaaaatatgaatgtatcaaaaaatagaaataaagtctttgcagaaaaagtctgtttttctctgaagtgtgttgagattatctgacaactctaagattgtacttaaattgtcaataaagcatcaaaagag

SEQ ID NO: 25 - DNA, 18054 bp, synthetic construct
  source 1..18054: mol_type = other DNA
agaggcaccgccccaagtttgttgtgaccggcgggggacgccggtggtggcggcagcggcggctgcgggggcaccgggccgcggcgccaccatggcggtgcgacaggcgctgggccgcggcctgcagctgggtcgagcgctgctgctgcgcttcacgggcaagcccggccgggcctacggcttggggcggccgggcccggcggcgggctgtgtccgcggggagcgtccaggctgggccgcaggaccgggcgcggagcctcgcagggtcgggctcgggctccctaaccgtctccgcttcttccgccagtcggtggccgggctggcggcgcggttgcagcggcagttcgtggtgcgggcctggggctgcgcgggcccttgcggccgggcagtctttctggccttcgggctagggctgggcctcatcgaggaaaaacaggcggagagccggcgggcggtctcggcctgtcaggagatccaggtgagcggggccgggtcctaagccgagcggaggacggagctaagcgcgggggcgggtcctcagctgggtgggggcggggctaggtgtggaggcggggctctgagcagatcgagggccgaggcgagggtccttaaagctcatctatttcaccattactgatcggctgctataaataaagccagcacctcccatttgttttaatgtttcccttcctcaaatgaagacatgttgccgattacagctcctgtcgcagcacagcaaaaggctttgtgtaaattttctaaaatgtacggacaactaaatcataacattcctatccctttgaggtagttgccgtccctaatttatggagaaggaaagtcctcaggtgaagggacttgctcgaagtcacacagctaataaaatgcagtgcccttaaccactgagccaggctgcctccgccgtttaaccaaaggattagtagtgacagagctgaaaccgcagtaaaaactatgaacggcgagaaaaacagtcctaacattttagttacctgtgtagagttatccctgctgactggatacacaagggttcttagggttttttaatgcttaaaatagcacaagacttctctttttgcccaaccaaagtctgtattagggttctccaaatggaatcaataggatgtgtctatatagaggcaggtttattttgaggacctggctccctatggggattggcaaagtcttaaaagccgcagagtaggcgggcaggctggagagccagggaggagccagcggtgcagttcaggtttgaagcctggccgctggcagaattccatcttcttccagggaggtcactcttcttcctgggggtgtagaaccactcactaaattagcatagcccctgcattttacaggttagggctgaggtggtggaagagggagtgacttgcccaaggacacagctgttagggccaagcagtggctcctgggtttcctggtttccatcccagttcttattgctcatcaccactgtctcatgtttgagctctggccagtttggggtgacaggtgacatctggcctagtccccagcccctgaccttgtcttttgccacagcttaactggcagaagctaaggatgggaaatttgactaatcctgcttaaaactaaagaggcttttttaactgaggagattgatcctcctaaacttaccattcacacacaccttcttcgcacacttcaccctcctatgcctgaaaatgttattagttatcaattaatttcacattaaaaaaattttttttggtcaggcactgtggctcatgcctgtaatcccagcactttgggaggctgaggcgggcggatcacgaggtcaggagtttgagaccagcctggccaacatggtggaaccctgtctctactaaaaatacaaaaattacccgggcgcagtggtgggcgcctgtaatcccagctacttgggagactgaggcaggagaattccttgaacccgggaggcggaggttgcagtgagctgagatcacgccactgcactccagcctgggtgacagagcaagactctgactggggggagaaaaagttgttttcactggctacttttgctggaattaatttcacatttaaaaaattctgggccgggcggggtggctcatgcctgtaatctcagcactttgggaggccaaggcgggcggatcatgaggtcaggagatcgagaccatcctggctaacatggtgaaaccccgcctctactaaaaatacaaaaaaattagccaggcatggtggcaggcgcctgtagtcccagctactcgggaggctgaggcaggagaatggcgtgaacccgggaggcagggcttgcagtgagccaagatcgcgccactgcactccagcctagaggacagagtgagactccgtctcaaaaaaaataaaaaataaaaaaataaaaaattctgaagccaggcatggtgactcatgcctataatcctggtgctttgggaggccaaggtgagagaatctcttgagcccaggagttgaagaccagctgggacaacatagtgagaccttgttcccacaaaatattaaaaagttagctaggcatggtggcacatgccgatagtcccagctacttaggaggctgaggtgggtggattgcttgagcccaggagtttgaggctgcagtgagctgtagttgcaacactgcaccccatcctgggcaactagcaggagtgtgctagtagcaagctctaaaaatttatattataaaaatatatatataatgtgtatatatatgtatatgtgtatatatgttgtgtatactataatatgtatgttccatataatagtatatagtatattttatatatatacacacacacgttgcttctgctccatgaagtttataagggaagttggattttccttttttttttttgatacggagtctcacaccgtcgcccaggctgtgcaatggcacgatctcagctcactgcaacctccacctcccagattcacgcaattcttctgcctcagcctcctgagtagctgggattacatgtgcacaccaccacacccggctaattttttgtattttttagtagagacggggtttcactatgttggccaggctggtcttgaactcctgacttcatgatccgcctccctcggcctcccaaagtgctgggattacaggcatgagccaccacgcccggcctggactttcatttttttaaaaggttcaaagttatagtgcaaggttaagttgcttacagatagcaggtgctttaggaaccctctagaaggaaagttgccatgggctgggtcatcagggctggtcacagaggaaggaggagcttgagttgggcttgatggctgagcagggatgagccagacagagcaatactatagaaacaggggctggaaggatgctgtgagcagctttcagagggaggcgtccaaaggatgagtgcaggcagcgtgcagaccagcctggcagcagccagaacacagataacctcctgggcagtctgatggacagccgagtgacacatgaaagcaacatattttgatgtggctcagagcagggaaggcacggcactgagagtggggtagtctagagatggtgcctggtaggctatggccaaggggcatatgcagagctgtgcctggcacccaggggtgactaaccttggaaaggaagagctcagcagatcagaccatttgagagggaaagcggagcctgggtgactggaagagtgacgtcaccgctgcctgaagcaggggaagacccaccagatttttgtcacatggcctctttcccagtgcagcactgcccccagcacctgcacctccatctatttctgtctgaactcttgtactcttgctacctttctggacagagtagcctcatcggggccctaagaggcagagagagaaagacagtactgaatccctctgctctggggatgcgcctgatgtcacccacttgcctgagagaccctctgagatcactgtggatcacacactcctgctagttgcccaggagccgtcagccaaggtctttgcagagcgagctgtctccataatcagacacctccagaactctgctggagagtgaaggcagcaaggagaggtgcactggctgcgggacgtggggtttctgacctctcagatcattgagtattgtgatcccagtgaagcaacagagtttgagaaaaatcattctgaataatgagaaagaagatggcctggacccaggctgagcagtagaacctggttgggttgtgtttttctggtttattgatctggtcgacgtggaccacgccttgctgcacctctctctgcctcccctgtttcccttttcttgggccttcctaggctccctggctcacggtgcattcttttctcatcacaggcaatttttacccagaaaagcaagccggggcctgacccgttggacacgagacgcttgcagggctttcggctggaggagtatctgatagggcagtccattggtaagggctgcagtgctgctgtgtatgaagccaccatgcctacattgccccagaacctggaggtgacaaagagcaccgggttgcttccagggagaggcccaggtaccagtgcaccaggagaagggcaggagcgagctccgggggcccctgccttccccttggccatcaagatgatgtggaacatctcggtaagcaccaggcctttcatctttaaaggagatgttctcaaaatgcccatcttagtgggcctggtgaggattttttccaggaagtaggtaggaaaagacagattatccacaggaaaggtgcctgtatagtcaggttacctccccctgttacacagaagtctaaaccagaatgtttgaaattgtattctgcccacagatcacccagagatcaggttcaaaggtagattttggccaggcctggtggaccatgcctgtaatcccagcactttgggaggccaatcacttgagctcaggagtttgagaccagcctgggcaacatgatgaaaccccatctctatgaaaaatacaaaaattagccgggtgtgacagcttgcacctgtatgtagtcttagctacttgggtggctggtggctgaagtgggaggatcacttgagtgcaagaggcagaggctgcagtgatccaagattgtggcactgcactccagcctgggtaacagagtaagaccctgtctcaaaacaaaacaaacaaacaaaaaaaacccaaaggtagattctgattcagcaggtcagggatggggcctaagattgtgccttcccaataagctcccacgtgataccaatgccactgctctgtcaaccacactttgagtaacaagtgcctaaaccactgatttctaccttgattggttagttcaccatcccctccttcctgcaacctgcctcactggagagggggaactggatctctttcctttaagctcactctgcaagcccacctccagctcagaggcttgcatgtcaactccctactctcaactcttggaaggactcaagactttgggaaattgaagagtatttttcccccacgaaaacaatttctgtccacttaatttatttaccttgccattgctaggtaggttttaaaaatgtattaagacccgatgctctgtctcctgcccatccctgggcccatccattcaaggccgcagtgggaagtggccacagccgttcatggtgggccctagaggatgcagtttcttgttctgatttggggaatgaaggttattagactgttgcactccaagctgggttaatagctaacaagtagccaaatcctttgcctgtgaaacatccagtcttagcatcaaaacatgccctggttggggcatgacagctgttgcattcacagcagctacaagattgttgattcttaccagatcttcttgatacaggtttcatatgtcctgagagcccttcccaatacaatgaggacaataaggtgctttccccactctttggtttttgtctgtttgtcgtgggggatggaggaaggctgttctgtgattcagtacaacttcacccagggtggagcatgtcaggctctggcctggctgctgaagggagcctgcagaatgagttagtgatccagtggtcaattttgaactggtggggaccagaggcaccgatggcaggaagcagcaccccatatcctgatcaccttggcatctcctccagccctggcatctaggctgcaagagtttgaggagtgtgaagaatcctctgagttggcatggatggtacctctgtctgcctcccaggagtaactagtctcagcctgccagttaagacaggtcatcttatctcgaaggtcagagccaattctaggcagtagctgccctgctccaggttacaggcagggcttacaaggaacttaccattctgctccggcctgtgtaaccctgggttccttgtgggtgttccaggcaggttcctccagcgaagccatcttgaacacaatgagccaggagctggtcccagcgagccgagtggccttggctggggagtatggagcagtcacttacaggtaagtgccctctgcctgccagactgactgggacttctttgagagcaacttcatccatcacttatgtcctcagcacctggtacagtgtctgatatgacagtagataataaaggcttaatgttggtgatggattttcagttagtggataatttcacttgggaaagattgcaggtaatctgaccccaaatgatgatgcacttgcgtaattcacattggagcaggggagaggaggccccccaaaaatgcccagttcacagtgttgcatgattgactggggttctcagattcctcctaagaaatgcacgggtagagcgccacctatcggaataaactgaactctgtccccaccagagggaacactcatttcactaatagttatgtgcactgatggtgccaagagattttaaaaaaaacaaaaagtggtctgttggcccagaggtctcagtgtggcagcagagagcccagggtgtaagtgctagaatcgagtatgcttgggctgagggagcccaggggaggcgtgtgctgcagaggaggggctgctcagaaagccttctcaaagggacagtttgtgccaccttgtgaaggatgaattggcattacttgggcagaggagtagggaagtggcattcccagcagagggaagagcaagtgaacagcagctacgctttcagctcagaaaagcccatgtccaccaccagcctcaccacaggtggtgaggactgacgcgcaggctatgacagaggagatacttgtgcccacctcaatatttacagcctggctcatgcctgtaatcccagcactttgggaggctgaggtaggcagatcacttgagcccaggagttcaagagcagcctgggcaacatggtgaaaccccgcctttacaaaaaataaattttagccgggcatgggggcaaatgcctgtgatcccagctactcaggaggctgaggcgggaggatcatttgagtccagggaggttgaggctgcagtgagccaagatcatgccactgcactccagcctgggcgaccctggagtgagaccctgtctctcatttgtagacccaccaagaagaggtgggtctgctgcatttttggtgatttactggagggctggtttatagatcttcattctgtcagaagcagggaggcaaaagtatgaaattaagggagtggttgtggaaaaccccttccatggtttggaggtttccaatgtgactgggagtccctgcaggccggtggaggtagctgctcaagtggctgctgcttctcctgaggcctttttggagaaagtggacacctgaatgtcagctgctttggggctaacatgatccttgatgcctccttttgtggcatgagtggcagccggccgacgtggtgctgtcctgctgccggagcaccatgatgtctgctgctgagacctcccatctgacatagtccctgtccctcttcagggactttgttcctttagcagttctcactgtctggcctcaaataacacgtctttttctgttggttcctttttgctccagctgtactgtaaacactctttgtttactgcataccctcagtaaatacctgttgaatgaccggatagatgtggcagcaggtacattacctcaacttctggtacaccttgggagaagctttcccaagaacaccctgggttcatttcctcctagcctctgctctcctggggcccagagattgaaggcgcttaacctgctcatctcaccacgtctcccgccttatctctcacccttctcatcagcaccctacactccaccacgctggcttcatagctccttccccgaatgtgccaggcttctctgtgaccatctcttgagcgtacagctggctatacctgggctgccctcctcccacatttcaggtctcagttcagacacccgcaaccccaccatgtatctccccagtacagccatactcctctgcccctgagctcccatgacacctgctggggccctgacagcctggggctgtgatcatgacttgcccaggggcccgagggtggaaacgatgctctggctcctttgattgcatagaacaggggccactcaggttgactcaagagcaggagcagcgcgtgggcacacgtggactgcagccacacagcctggggaccatgcagtgctgggagaggccggtgccctgctctctccccagcaccgtctaggctctgccccattcgcttccctccaccattgttatgcagcaaagggggctctagcctgatgtgctagaagcagtcacactggatttttgagaaaagccaagctttctattgtgagtcgactcatatggagacaggagttgaattcaaccctgtctccctgtgctagctttaaggcggtaattttattagaggaggtttaaggggtggattctaagattagcaggtgattgatggaaggaaaggagaagtctggacagtccttggacatgcacagttatctgttcatgccaactcatgggtcccctgtgcagatttgggaggagtgagtatgaaacgtgcagtggcaattcaggctttgacatcagcaaacttgttctgtgcaagctgcaattggccttattggttccaaccaatttcagccagttcttttatctcataagcagagggagtttcagcctttcagaaagtggtttctgcaaactcaaattttcttttatttttctgagacagggtcttactctgttgcccaggctggagagcagtggcgtgatcttggctcactgcagcctcaacctccctgggctcaagtgatcctcccacctcagcctcccaagtagctgggtctgcaggcacatgccaccatgcccagctaatttttgtagtttttgtagagacagagtttctccatgttgcccgggctggcctcgaactcctgggctcaagcaattgcctgcctcagcctcccaaattgctgggattacaggagtgagccacgggaatttccatcagttactgattcttgaacttgtaggaacgtggttccactgtccacatgctgttctttcctcgcatctcctgttcctgcttccctttggcctgctcacctctggctcctcatggccccagtgaagtatcgtggcttcctctccactgcagactggcagatttcttcactcacactcccaaaaagagaatctacttccctcccttcccttcgtccaaccatctgggtctcgagtgtcactgtaggttcactgccgttggggcaggtgactccttgggccagtcagctttggctgaagggcagggctggcacacagctggcagagccaccccatccaaaatccagccactgtgcctcagcagggctgtggtttgggggtcggggggcgctccccacaggataaggagcagccagggcaggcagatgacactaccactactagctgcatctggatctattcacttattcaacaaaggtttattacacccatattctatgccaactactgtactagacttggaataatggagaaaattcaggcacagtccttgctcttagggagctcacatgattactcattgatgaatatctctctcccctgatagactgcaaatccatgaggacagggactctgtcttgttctgtgccatagttccacagcattccagcatgatgtctggtactcagcatgcaaacagtgcgtattggttgaatgaataatagtacagctaatagcagctgagagcttcctctgtgctagacacgattctaggtgccttccacactttgacaaccttatgcagcgtgttaacactgcattccccttgcaccctggagattgagcccagagaagataaggacagaggggacacattccaagatagatcccccagtggatgcctgaagccacagatagtaacaaaccctatatatactgtgttttttcctatacacacatacctatggtaaagtttaatttataaattaggcacagtaaaaaattaaagataactaataaaatagaataattatgacaatatactgtaataaaagttatgtgaatgtggtctctctctctctcctctctctaaatatcttcttgtactcacctattctcaaactgtagataactgaaattgcagaaagcaaaactgtggataaggttggggctactgcaactcagccaaggacttacagtggcagacctggaatgcaaacccaggcagtctgataccagggtttctccacctgtgttctgccacatgggatggataggatggatgggtgtacggatggacggacggacagacggatggacaaatggattgaaggatgggtaggggagtcatcagatgtgttctccaacaccatgtacagtacctggcacatagcaaatctatgataaacatttgatagtaagtgaataatgaatgtcagtgccagtgttggtgtggccttaggttattctttccaggtgttgtatctgatgctggcctcatatgtttgtctcacttggctgactagaaaatccaagagaggtcccaagcaactagcccctcaccccaacatcatccgggttctccgcgccttcacctcttccgtgccgctgctgccaggggccctggtcgactaccctgatgtgctgccctcacgcctccaccctgaaggcctgggccatggccggacgctgttcctcgttatgaagaagtaagtgacagcagcgcggcagggcctggagctgatacatctcccaaggggagctggttcctgccctccatgtgcaccttgatcagggggttttggagaacagggtcatcacccttccggagaagaaagccatgcaaagggaacatatctgccctggagagcattttccctgtaggacgatttttcatggaaacaaactctcatcttcatccagaacatacttgtcacctagtccttttggtccatttgactgttaaccttttctgtggctggacttatctgtttttaacataaaaaccgttctccttcctcaccctctgtatcccctaactttgctatagtgggtattttattttaaggaaataattatctgcaccattactttgaatatagggagccccaactcttacttcctaatttgaggatggtgagtgggagggaacagaaaggatgctggggaaaagtgggaatcaaagtgctcctggaaggggaagaggaacggcctaaccctaacagtgattaaggttattaggaggccgggaatggtggctgacgcctgtaatcccagcactttggaaggcggaggtgggtagatcacttgaggtcaggagtttgagaccagcctggccaacatgatgaaaccctgtatctactaaacatacaaaaattagcctggtgtggtggcgggcacctataatcccagctactcgggaggctgaggtaggagaattgcttgaacctggaaggtggaggttgcagtgagccaagatcgtgctactgcactccagcttggcgacagagtgagactccatctcaaaaaaaaaaaaaaaaacgtattgggagtcgtcgatgtgtggtagccagaggccctctcccctctccgccagctatccctgtaccctgcgccagtacctttgtgtgaacacacccagcccccgcctcgccgccatgatgctgctgcagctgctggaaggcgtggaccatctggttcaacagggcatcgcgcacagagacctgaaatccgacaacatccttgtggagctggacccaggtaggaacctgctgcaccatcagagctctccaggggcactagagggtgggtcaggagcatttaggactgactcttcaggtcctctctggttttgtgttctaagtcatgtctttatttagctccgcacacaagaggttagcaatctctcccttagaacggggtttttttttctctctttgcagagagacagcacttcccaagttcctttctctagcccacttaaagaacaaggacctcagtgctgcaagttttcctaggtaaataaagaggcccggcacagtggctgacacctgtaatcccaacactttgggaggcttgcttgaggattgcttgaggccagcagtttgagaccagcctgggaaacagagtgagatcccttctctacaaaaaaaaaatatgttttaaattagccggaaaaaaagttagccaggcatggtggcatgcacctgtagccccagctacttgggaggctgaggtcggaggatcacttgagcctaggagttaagagtctgcaatgagctatgaatgtgccactgtactccagcctgggcagcagagtgagatcctatctcaaaaaaataataaaaaataataaagtaaaagagaagtagactttagctcattataaaaaataactttcggccgggggtagtggctcacgcctgtaatcccagcactttgagaggctgaggcgggcagatcatgaggtcaagagatcgagaccatcctggccaacatggtgaaaccccatctctactaaaaatacaaaaattagctgggcatggtggcgggcgcctgtaatctcagctacttgggaagctgaggcaggagaattgcttgaacccgggaggcggaggttgtagtgagccgagattgtgccactgcattccagcctggcgacagagtgagagtccatctcaaaataaattaattaattaattaaatttttcaaacaatgaaagctgtccaaatgtaagcccagttgcctctggaaatgagttgcctaccactggaagcattcaagtagaagctgaatggccacttgcctaggaaaattgtaaggagattcatacatctgataaatttttgaactagaagatttaaaataattgactagaggaactggcttttattatttctttatttatttacttatttatttatttatttatttgagacagaatcttgctttgttgcccaggctggagtgcagtggcgccatctcagctcactgcaacctctgcttcccaggttcaagcaattctcgtgcctccgcctcctgagtagctaggattacaggcaggtgccaccacgcctagctaatttttgatttttttttttttttttttttgagactgagtctcgctctgtcacccaggctggagtgcaatggcatgatctcggctcactgcaagctctacctcccaggttcacaccattctcctgcttcagcctcccgagtagctgggactacaggcgcccaccaccacgcccggctaatttttttgtatttttagtacagacggggtttcaccatgttagccaggatggtctctatctcctgacttcgtgatccacctgcttcggcctcccaaagcgctgggattattatttttagtggagatggggtttcactgttggccaggctggtctcaaactcctggcctcaagtgatccacccacctcagcctccaaaatgttgggattacaggtatgagccaccacgcccagctgggagttggcttttttttttttttttttttttgagacggagtctcactctgtcgcccaggctggagtgcagtggcatgatcttggctcactgcaacccctgcctatcgggttcaagcaattctcccgcctcagcctcctgagtagctgggattacaggcacacgccactacacctggctgatttttgtatttttagtagagacggggtttcaccatgttggtcaggctgatctggaactcctgacttcgtgatccgcctgcctcggcctcccaaagttctgggattacaggcgtgagccactgcgcccagccaggaactggctttttaaaggaattttgtgtggacccttttacaaataaccaattctttttttattttttctgagacagagtctcgctgtgttgctcaggctgaagtgattctcctgtctcagcctccttcacctcccaggttcaagtaattctcctgtctcagcctcccgagtagctgggatacaggcacacaccaccatgcctggctagtttttttgtatttttagtagagacaggggtttcaccatgttggccaggctggtcttgaactcctgacctcaggtgatctacccgcctcggcctcccaaaatgttggcattacaggccaccacacccggcaataactgattcttaatgcacctggttcttaggtttggatttggggtttcaaattcaaatcaaagtctcctggggtataagggcccttggagatcatttgaaccaagctctagctcctttggtcttggggacagctccaattactagaacatgatttaaattgagccacacagtcctttgcctggggattttgcagcctgtacttactggaggcatttccgtgttcgcacagcaggcccttctgatcagctctcaggccttgctgacctcctgggccaacactgagccattagcccctgtcagctatgtcttgctggtggctttagtagggacataggagggcctctcagagggaaggaggggaggagaaatggtcactttgcttgctccttcccagacggctgcccctggctggtgatcgcagattttggctgctgcctggctgatgagagcatcggcctgcagttgcccttcagcagctggtacgtggatcggggcggaaacggctgtctgatggccccagaggtgagtcccgagtgtgtcatgcgccatcggcagcccttcccccacatgtccactgaatgcaggagactcgatgccttgtgataacccaacacctccatcttttctgacccataatttggcacaagttccttccctgccactttgctttcctccggcgttccctcatgttccaggagaatgcaagtcctgtcacataaaccaggtggtctaagcagaccccttctgggtctgagccacagctcactcaagctctgggttccttgggacagagttcagattagcccatggatcaggtgatgtgcaggacatgaaaaggttagatgggcgggcagcgtgatgtctcacccactgcttctgagcaggtgtccacggcccgtcctggccccagggcagtgattgactacagcaaggctgatgcctgggcagtgggagccatcgcctatgaaatcttcgggcttgtcaatcccttctacggccagggcaaggcccaccttgaaagccgcagctaccaagaggctcagctacctgcactgcccgagtcagtgcctccagacgtgagacagttggtgagggcactgctccagcgagaggccagcaaggtgaggctgtccccggcttcgaggggacggtgtgggtagaaacctctgttctcgttccagagtgaaggtcaggtttgggccagagccacagtgacagatcctctgtgttaggaaggtaaaggctagttacaagagaacaaaaaacagattttaatgtaggtaggagtaggagcactagccaccacagcatagtcagaatcctagcagttcaactcctgtggcttttttagttgctgaaaaagttgttcagaggccagacacggtggcttacacctataatcacagcactttgggaggctgaggcgggtggatcacttgggaccaggagttccagtccagcctggccaacatggtaaaaccccgtctgtactaaaaatacaaaaattagctgagtgtcgtggcacacgcctgtaattccaggtactcgggaggctgaagcaggagaatcgtttgaaccctggaggcagaggttgcagtgagccaagatcgcgccactgcactctggcctaggtgacagtgcaagtctttgtctcaaaaaaaaaaaaaaaaaaaaaaggctattcagagagagaaaaggaggcatttttgagaaatgtttaatggagatgtagctcatggaagcagctgagaactgatcagagagagatggaaaacatctcctgagagcagatctggacattgtgaaattaatataaaggaatgcaaaggcagacctatccgaagccataattggagtggcagctggctcaggggcaggcttagtgcaaagagctgagccatacctgcaccccagcactgttctgccactccgttaactgctctctgtacgtggcctgctatcttggtgcgcagtgaaggttagaacaacagctgcaaccagttatgaaatgatagaggagactacttacctggttcaagggaccagatagctgtgcacaagaggcactaggctttccacccagggggaaaggctatttcaacaatgcatgctgccccatgcagaggtgtacacatggaaaagcttggagcacgggcaggggacaggcagtatttgtcacctgagtgaagggcatcagtaggagatagggtagaggaagaattgggttgggaccagagaagggaagaccctcactaacaaagcaggctttgggttgagactgtgttaacagatgttctagctacagcttcccttcctgttgcagagaccatctgcccgagtagccgcaaatgtgcttcatctaagcctctggggtgaacatattctagccctgaagaatctgaagttagacaagatggttggctggctcctccaacaatcggccgccactttgttggccaacaggctcacagagaagtgttgtgtggaaacaaaaatgaagatgctctttctggctaacctggagtgtgaaacgctctgccaggcagccctcctcctctgctcatggagggcagccctgtgatgtccctgcatggagctggtgaattactaaaagaacatggcatcctctgtgtcgtgatggtctgtgaatggtgagggtgggagtcaggagacaagacagcgcagagagggctggttagccggaaaaggcctcgggcttggcaaatggaagaacttgagtgagagttcagtctgcagtcctctgctcacagacatctgaaaagtgaatggccaagctggtctagtagatgaggctggactgaggaggggtaggcctgcatccacagagaggatccaggccaaggcactggctgtcagtggcagagtttggctgtgacctttgcccctaacacgaggaactcgtttgaagggggcagcgtagcatgtctgatttgccacctggatgaaggcagacatcaacatgggtcagcacgttcagttacgggagtgggaaattacatgaggcctgggcctctgcgttcccaagctgtgcgttctggaccagctactgaattattaatctcacttagcgaaagtgacggatgagcagtaagtaagtaagtgtggggatttaaacttgagggtttccctcctgactagcctctcttacaggaattgtgaaatattaaatgcaaatttacaactgcagatgacgtatgtgccttgaactgaatatttggctttaagaatgattcttatactctgaaggtgagaatattttgtgggcaggtatcaacattggggaagagatttcatgtctaactaactaactttatacatgatttttaggaagctattgcctaaatcagcgtcaacatgcagtaaaggttgtcttcaactga

SEQ ID NO: 26 - DNA, 29441 bp, synthetic construct
  source 1..29441: mol_type = other DNA
ctgtttctctgcagttttcctcagctttgggtggtggccgctgccgggcatcggcttccagtccgcggagggcgaggcggcgtggacagcggccccggcacccagcgccccgccgcccgcaagccgcgcgcccgtccgccgcgccccgagcccgccgcttcctatctcagcgccctgccgccgccgccgcggcccagcgagcggccctgatgcaggccatcaagtgtgtggtggtgggagacgggtgagtgcgcggccggggccgggctggaggccgcgggatcgggcgcggaggggggttgggcccggactggggcccaggcaggccggcgtccgccgcggtctcgcgtaggcggtgggcctgggcctgtgtcgcggggcgggggccgcgggcgggcgcccccaccggaccctgacggcccgggcggcgcgtgcctggttccggctctcgatggaggagggcctcgccgctcgccggctagagggaaaagtgaactccaccctccggctttcttcccggacgccgcccgccgccctcctcgggagcgctcgtagagcaagcgctcttggagattttgaccatttttccaaaaagggaccctttattttttttgcatgaacctctcgatccccttttgagaattgggttgggaacgcggcggtcaagtcgatcatatttgatgcatgcttgattgtacgggccgctttggtgcccccaaacttttctttaaaaaaatttttttttcatagacggggtctcgctgtgttgcccaggccggtctcgaactcctgggttcaagcaatcctcccatcccagcctccaaaatgctgggattacaggcgtgtgccaccacgcctggctaatctttaaaagttttttgtagaaatggggtctcactgtgttgtccaggctggtctcgaattcctgcgctcaagtgattctcctgcctctcagcctccaaaagcgctggggtgacaccgcgcccggcctctcaacttattttcgacaggttttttgacttacacttctgccactgttaggattcttaaaattgttttcgccctttccgtggagaaagttttgaagatgctggctgggaggagccggctgtaatgggggactgttttttcttttctttctttcttttttttttttaaacaacgtggtgtggtcattgacaaaaaaactgttctttgcttaacgcgttaggtatgggatgtagcagaactggccccctgtgactccaggcattgcttttcatgattgtccgtgatggttacaggccctagaggaagacaaaacttgtcttatgcagtttttttctcccatagaaacaagaatctcagtgtaacccgagcaaaatcgcgcgtctcagcgttgcttgtataggttagtgttagcgaggaagaattactaccagtttaatcaaactcaatgcaactggtacatgttgcagtaaagtccaaggaaagttctggcatcacggttaactggattgatattcttcaaacttatcattaggacagattttggttcttgcaattcagatgcaagaaggataattagacagctgatttttgtaagatgcccatctgtcggatttgtcttggaagtgtgaaggagtattagagtatgtaggctattcaggcttttttttttttttttttttttttgagacggagtttcactctgttgcccaggctggagtgcagtggcacgatttcggctcactacaacctccgcctcccaggttcaagcgatcctcctgcctcagtgtccttagtagctgggattacaggcacgcgccaccgtgtccggctaatttttgtattttttagtagagacggggtttcaccatgttggcctggctggtctcgaattcctgacctcaggtgatccacccgcctgggtctcccagagtgttgggattacaggcgtaagccacggcgcccggcccaattttttttttttttcttttcttttttttttttttgagacggggtctcactctgtcgcccaggctggagtgcaatggcgcgatctctgctcctgcaacctctgcctcccgggttcaagcgattctcgtgccttagtctcccaagtagctgggattacaggcgcaagccaccatgcccagctaatttgttttttttttttttttttgtatttttttggtggagacggagtttcaccatgttggtgaggctggtctcaaactcctgaccctcaagtgatccgcccgcctcggcctgtttttttttttttttttttttaagtcatattgctgataattatttgaaaatttctaaaactaaaacataagcatagcagatacgtttatttaatactaaccgattgtggacctctgctgtttgaattggctgttttatctagtcaaataacttgttgaatgtcatggaatctggaccgtcccttcaaatccccaccccaccgcttacatggggtaaccctaagcacatcccccacctcccaagagaggcggttcaatgggaggtcaacaagactaaacaagatgttggttattaactacctcgcaggtgccccttgctgaatgcttagtaaatgccaggtactgttattgcggtttctactactgagactctgtgagggagtattaggcttaaaagtctgtggccttgagttttcagtctgttttttttttttaattagttatgagcatttgaacaagcacagttattttttaatactatgtttagtattgatgttgactacagctaagtgatattagaagtgaaatgtacctggccaggtcaggtggctcacacctgtaacccagcattttgggaggccaaggtgggtggatcactagagcttaggagttcaagaccagcctgggcaacatggcgagaccctgtctctgctaaaaatacaaaaattagctaggtgtagacacatgtgcctgtagtcccagctactcgggaggctaaggtgggaggatcgcttgaaacccaggaggtggaggttgtagtgagctgagattgtgccattgcactccagcccgtgcgacagagtgagaccttgtctcaaaaaagcaaaaacaaaaactattagagatacgtctttggccgggcacggtagctcaagcctgtaatcccagcactttgggaggccgaggtgggcggttcacctgaggtcaggagtttgagaccagtctggccaatatggcgaaacctcgtctctactaaaaatagaaaaattagctgggcacgcctgtaatcctagctattcaggaggttgaggcaggagaatcgcttgaacttgggaggtggaggttgcagtgagccaagattgtaccattgcactccagcttgggtgacagagggaaactgtctttttttgtttgtttgtttttaaaggagatacatcttcatctgttcctgctttgaccctttgcctggaccatggcagtgtcctttcaggctgtacgtccctccatcctgccctcctgtgcctctgcttacactgggctcttaaggaaactcctgctccttgtctcatcatccctagggatggttctgtcttatcatttctagaattggatgccttgccatcttgtttgctccttaactctgcatacagggctgtgtaaataattccttcatgaaaatctctatttcaatcttctgggatgagttttttccttctgggaccctgactgatagagactgataatacacccgtatgaaaatatgtctgccaggtgcggtggctcatgcctgtaatctcagcactttgggaggccgaggcaggcggatcacctgaggtcaggagctcgagaccagcctggccaacatggcaaaaccctgtctctactaaaagtacaaaaattagccgggcgtggtggtgggcgcctgtaatcccagctactcaggatgctgaggcaggagaatcacttgaacccggaaggcggaagttgcagtgagctgagattgtgtcactgcactccagcctgggcgacaagagcaaggctctgtcttgaaaaaaaaagaaaaaaagtcagaaataatttgcaaagcatgttagaaaattctagatttcctgaatagcaatttaattgagattggccaagaaatattacatagggttgatactcttttattctaagatagtcctttctgagcatggggtctataatttttttttcctccaccttactgctgccccaccttttaactttcacttagtggacctttgccccaagattttctctcagcttttcctaggtaagacagcatcacccgggcgcgatggctcatgcctgtaatcccagaactttgggaggccaaggcaggcggattgcctgaagtcaggagttcgagaccagtctggccaatatggtgaaaccctgtctctactaaaaatacaaaaaaattagccaaggatggtggggggcgcctgtaatcctagctactcgggaggctgaggcaggggaattgtttgaatcaagggaggtggaagttgcagtgagccaatatcgtgccactgcactccagcctgggtaacagagtgagactccgtctcaaaaaggaaaaaaaagacagcatcttacattcaggtatttataaacaacttttattatttatttgtttttattttatattggctcactgcagcctccacctcctgggttcaagtgattctcctgcgtcagcctcccaagtagctggaactacacgtgcctgctaccatgccgaggtaattttttttttttttttttttttgagaaggagttttcgccctttttgcaaaggttggagtgcagtggtgcgatctcggctcactgcaacctcctcctcctgggttcaagcgattctcctgcctcagcttgtcgagtaggtgggattacagtcacgctccaccacactgactaatttcgtatttttaatagagacgaggtttctccttgttagccaggttggtctcaaacgcctgacctcaggttatccacctgccttagcctctcaaaaagtactgggattacaggcatgagccactacgcctggcaattttttgtatttttaatagagacagggtttcaccatgttgaccaggttggtttcgaactcctgaccttaggcgatctgcccgccttggcctcccaaagtgctgggattatgggcgtgagccatcgtccctggcctaaacaacagttttattattttattttttatttttttattgcttattactattttttgagatggagtctcgctctgtcacccaggccggggtgcagtggcatgatatgggctcatggcaacctctgcctcctgggttcaagcagttctcctgctttggcctcccaaagtgatggaattacaggcccgagccactgcgcccggccacaactattttaatagtgttgttttggtgttggttgattaaaggaatgggaacgaatgacttgaagccctctctgtttcactctttatacaaagtggagtccagattgggctagtggcctgtctagcccaatgtctgacttggacatacattactgtccaggagtttcttagctgaatgtgaaaaatgccttccgtgacatcatccttacaggaacattctttacatttattctttacttctgttgaacggtggtggcgtgaaccatgaatttgtttaagcttttcagctgttttgtgtgttttcctctcaaggcatggggtttcatatttttgacctgtggtaaaggtatttgaattctgcactggcctccaaatgtaggtgtagtatatggctctgatctttgttgatgattttatacataatgtggttttttttcttgataagccaaaaaaattatacataatgtgtgtgtgtgtgtgtgttttaatttcaaatgatagttacagtaaaagtttggagttgggctaagtgggaggagcatcaggaagccatttttagaaaccttaaattcaccctttataactttctgtctttttgcattagtcatctgataccttagtactgcctactttttcacatctccatcactacgtagctcttaaaattgtagtcttccttgaaaggagatgtttttgtcaagagtctttgccaccaaggcaggattgcatgtgatcagtaggaatattttcctgcaatgtcttaatatgaaaaatttcaaacagactagtggaaagcattgtacagtcaacatgcacatacccatggcctggattctatgacagtattttgctctacttgttcattttgctgtatttgctttatcatgtcttcctgttatcagagggaaccttttaagaggatttatagaggagttgattttgttttttgttttgttttgttttgctctttttgaggtggagtcttgctctgttgcccaggctggagtgcaatggcatgatctctgctcactgcaatctccgcatcccaggttcaggcgattctcctgcctcagcctcctgagtagctgggcttacaggcacccaccaccatgcctggctaatttttgtattcttagttgagacaggtttcaccatcttggccaggctggtctggaactcctgacctcaggtgatccacctgcctcggcctcccaaagtgatgggattacaggcgtcagccaccatgcccggcctgattttgaaaaagaatagggactgtgtgcagttacatataaattcttatttttgaactcttgtgtgttcagctggcttgtatcaactacaccagggttagccttgattctggaagggtggattcagacttcagctcagttgtacatagtgtcttcagcctaagtgagaaactttatgcactatcttaattttttgaagcttctagtggtaataattgctggctttttttttttttttttggtagaaacagagtcttgctctgtcgccaggctggagtgcagtggcacgaaatcagctcactgcaacctctgcctcccaggttcaagcaattctcctgcctcagcctcctgagtagctgagattacaggcgtgtgccaccacacccagctaatttcttttgtattttagtagagacggggtttcactgtgctgcccaggctggtcttgaactcctaaggtcagacagtccgcccaccttgccctcctaaagtgctaggattacaggcatgagccaccgtgcctggcttatggctagctttctttacattgattgtgaagtcagatattggtagtagaacatcataattttagattgggttttgtgtttatttagcactgcactactctagtggtgtatttttctggacagattttatctgcatagttaacgcagttatatataaggcctaccgttacagaatccccataccttgtttgtcagtgtaaatcgaggaccttcatgcgaggtctttaatttattcaataagtaggaatatatatttgacagttactaaattctactgccttgtccttaagatctacatacttttttttgttttttgagtcagagagtctcgctctgttgctcaggctggagtgcagtgatgcgatctcagctcactgcaacctctaccccgtggcctcaagcgatacttctgcctcagcctcctgagtagctgggattacaggcgcctgccaccacactcagctaattttttgtatttttaatagagatgcagtttcgctgtgttggtcagtctggtctcgaactcctggcctgaagtgatccacccgccttggcctcttgctgggattacagggaagagccactgcgcctggccaagatctactcacttttagacagcaatatatgctctgtattttggtttgcaattgtaattgtcattggaagagtttggcttttctgtcctgagatcaacgtgtctttaaaagaaggcagtgcagaaagttgttattttttgagcttcttggatcttttatttttttaacgtgaggaaattcctagcgtttctagatttgttgattgtgcttttaagttttggtttatagatttcaggaagtaacactaaagtttaccctactctcctcaaaaagtaagtaaaaagttctcttggctgggcgtggtggctcacgcctgtaaccccagcactttgggaggccgatggggtggatctcctgaggtcaggaattcgagaccagtctggccaacatggcaaaaccctgtctctactgaaaatacaacaacaaaaaaaaattagctggatgtggtggtgcttacgtgtagtcccagctacttgggaggctgaggcaggagaattgttcgaacccagcaggcagaggttgtggtaagccaggattgcaccattgggctccagcctggaagacagagccaagactccgtcttaaagttctcttaatggaaaaatgaagaacataatagcaacataagttatttgctttcattgtggttatttctacaggacagggcaggggaagcacagataggttaaaaaaaattgtagcatcatgagctagggggaaatccaatgtagaaatggcatgaactttcttccagccgactcatgttcgtttcctagagtgatgacattgctcgatgattgaaaagaggttgaactgagcagttaattatataaagttagaaattccaaagaagtagtaactaccagaaattctccagcagtatcagtcaagacttgtggccaaatacggcttccattcttcatgagggaaaggccatggaaaggctgtcacattgcccagtgcagatgttgacttggtttgtggaagcgcagcgtggacaaggaatgaatatacactaataggagtggaataacctttttcttttacctatttgaataaattaagtaaaagttttaatcagaagacttaaagaggagtcgattttatcttttgattgcactaagcttaaatataaggttgcactttaagaattctgtagtttaataatcatattcttataagacatagatttgtaacaaatagtgattggtaataaaatttcagtcagtatcagattatgccagtaccttgaatttcttcccggttgagcctttctcagctaaagatgtcattcaggaaaggaagtttagaggattttagacacagctggttgcctttatattagtagttttgttcctcatatacatagagacttaggacagaatagtaaaagaagtgataatgacattttatcataacagtcaaaaccttcatagcagcttatccttgacactgagtggcaactattgttaaggtttttacacaacctttatctttttttttttttttttttttttttttttttttttgagacggagttttgctcttgttgcccaggctggagtgcaatggcgcaatctcggctcactgcaacttccgcctcccgggttcaagcgactctcctgcttcagcctcccgagtagctgggattacaggcatgcacgcccggctaattttgtatttttagtagagaggggtttctccatgttggtcaggctcttctcgaattcctgacctcaggtgatccgcccgccttggcctcccaaagtgctgggattacatgtgtgagccaccgagcccagccaacctttatcatttttaaaaaggtcccttagagccttaggctccactttcttcctcagctgccacatccaaaccatgggtaagcgatgcttgatctgcctccaagttcaagcagtccaggaaacagcccacttatgttcactgtccagtccccattcttggtccaggccaccatggatggctcctggactgtagcaacagcttccatgtgtgtctgccttgactgagtccctggcgtcctcaggcttcctgccacactgcagttggaggcttcttctaaaatccagtgctttctgggcaatttaaaacctgtgactttccaagtaggatctagtccccatgtccttaacaagaagaggtaacgtatttccctatgccactgcccacttatttttttattgttgagatgggatcgtgctttgtcacctaggctgggtggagtggtgtgatcacagctcactgctgccctgaattcctgggctgaagggatcctcttgcttcagcctcctgagtagctgggactacaggcaagagccaccacttatttttgaattttttgtggaaacaaggtctccctatgttgcccaggctggtcttgaactcctgggctcagcgatcctcccacctcaggcccctgtgctgggattatagcctcctgtgctgggattacaggcctaagccactgcaccaggcttttattttttaatttaaaaaaatttatttttttgagacagggtctcactttgtccctcagactggatgcactggtgcaatcttgtttcactgcagccttgacctccctcctgggttcaagtgatcctcgtgcctcagccccccaagtagctgagactactgctgcacaccgccacacccacctaatttttgtatttttagtagagaacgggtttctccatgttggcccagctggtcttgaactcctgggctcaagcgatccacccacctcagcctcccaaagtgctaggattacaggcatgagccaccatgcctggcctaaaaatatttttttcagctctagaaatgttagctcttttgctgtacatttccagagctgctttaataatgacagttatcacacgcataatttcatgtgatgattgcattcttaatttttaaatttaacaactgcacttacttcatgaggtcttgttcattgatacatctttagcacctagtgtgcttctggtgtagcacacggttgatataaattgaaattgaattaatgctcacagtagtttggggatggagctggtagttctgcattaattttgcaggtgaaaaaaaaaggcatgaggaagttgaaacttgccaaaaaatacagccagtacgtgctagaattggccctgggtctcaaatctgggcttctgactccaaagcttaggctcctgctcatacaggtttattttcacattctaagcttttaacgaaatgtatgtccaatgagtcatttctgtttagaaagcctttaggagttggaagctacttcctggtgatgtaatgtttgactctctaaagtctttggaatggggagttccaacttttgttaagccctcaataatgtcatgagtgaatgaatattggcaagactggctgggcctgtaatctgccttgagtgtgagggaaaatggaaaagcgcttaactttatggtgaattctaatttatagtagttgagattgaacgacaaaaatcttaaaattatgatgctgatgtgtcattgtgaccttggtaaactgacagcacagcagagagaagggctcattaaggagagcacttggctaactgaaccctcaggatgccagagacttgaattctcatgtaagcccttaagcttgccttgtcaatgctgtaaaaattggagacctttatgttttgctaatgatgtggtgaccttagttattaggtgatagcctcttgaaaaacattccaggtggttgggagactttcagccaccactcttctgcctggcggcacactggtaatattaggattagtctctacccattgccagttgtgcaggtggtgctcctttctctgaagtatttctacacacttctctgtttggcaagtttaactcccatcgtctctgagctgttaattaaatgtctgggatgtattgtgatagtccctgcttatagacttatggtgctgtgtgaggattggggctgggggaggtggcatttaaatacagctgaatcaatgtgatggcagttacgtgtggtagtttattgactaagcactttctctcaagagaacagtcattgctgattgccataggggaggctgtagggatgtggtgggattttgagctgtcccacttaaggcagcagaataagttacttaaagaggaaggctgtgtttgtatattagtgttaattaaaatacctttaggctgggtgtggtggctccagcctgtaatcccagcactttgggaggtccaggtgggcggatcacttgaggtcaggagttcgagaccagcctggccaacatggcgaaaacccatctctactaaaaatacaaaaaaattatccaggcgtggtggtggacagctgtaatcccagctacttgggaggctgaggcaggagaatcgcttgaacctgggaggcagaggttgcagtgagccaagatggtgcctctgcactgcactccagctggggcgacagcacgagactcggtctcaaaaaaaaaaaaaaaagaaaaaaaagaaaaaaagaaaatatcttcaggatcaaacttaagattcttgatgagaggctctacagatgttcacagaagagacgtgaagttttaaaatcttgtttctcttgagtcttgtagctaggtgacaactgtttcttgactattaatgctaacaccgggtacctaaacagaatgtgatggctcctgactctatctttctgagaaattctagtttgtttactttaaatttcagggtaccaatgtgtatgtggtgataaagggttatagaaaacattttctttaatgctaagtatgtgatgtatatgccttgattttttttctctagaaattattttaacttaatagtgaaagctaagattacattcatgttgactaagcaaccttttttctctttctctttagagctgtaggtaaaacttgcctactgatcagttacacaaccaatgcatttcctggagaatatatccctactgtgtaagtatcttaaattgggaattaacctgtttgtgttacgggtttcacatttctttgaccatttgttttgctgtaaagccatctttaatcctcatatgaacagatactaattttttcttaaacattcactgaaacctaattataaggtatattaggcttttaaaaaatagggctgggggtggtgatctcagcactttgggagactgaggcgggtggatcaactgagggtcaggagttcgagaccagcatggtcaacgtgatgaaaccccatctctactaaaaatacaaaaaattagccaggtgtggtggcgggtgcctgtaatcccacatacttgggaggctgaggcaggagaatcactcgaaccgtggaggcggaggttgcagtgagccaagatcacgccactgcactccagcctgggcaatgagagcgaaactccatctcaaaagaaaaaaaaaaaagaaacttagggtaatataaacttttcacaactttgctagttgatttttagacatccagaaagcaaactttaactgtctgtgaggtacagagactggatgatgttaaagaaaaccatagttggacacaagaactctgaccaaaagtctgatcagaaacagtccttgtcagtgcacgagtttcagatacactggctttctgggaactggaaagggaaagattccattacgttttaattggccttttctgataagtcatcagttggttacatgtccgcattgaggtgtagggctttggaattgaaacttgggtgtgtgtgttgaagggggaatgggagggtggaattggctattgaattgcttactccctataggcagcagaattgggtggagacaggaaagtgctgctctggtgatgggttacccgggagcgcacgtagctgagcctcataatgcaccatcctgcagctgctgtgagtcctccctgtgcaggctggggaggtgtcgcctcctccccacctgtgttcacctcctcaggcacaacacacacccaggtgctctctgaagtgtcgtacccatgtttttgttgttgttgttgttgttttccttttttttttttttttttggagttagtctctctctcttgcccaggatggagtgctgtgatgcgatctcagctcactgcagcgtctgcctcctgggttcaagtgattctctgcctcagcctcccaggtagctgtgattacaggcatacaccaccacacctggctaatttttgtttctttagtagagacgggtttcaccatgttggccaggttggtctcaaactcctgacctcaggtgatctgcccacttcagcctcccaaagtgctgggattacaggcgtgagccacggcacccattttttactgtaagtggaatcatgctgtccctgttgtcctaaatttatgggggagattttccttatctacatatgtagataaaggtttaatcattaatgattaatgattttgaagtactataactgatttaacccactggtcacttggactcttggtgttaacaaacattgctgggttcagtgttgtcccttatgtctttgtgtacacttgatagattattagaagcaaaatcgtgccaaatcaaaagacaatggatgttttaaattttggtagatacagctgggcgtgattgctcacgcctgtaatcccagcactttgggaggccaagacggaaggatcacttgaggtcaggagttcgagaccaacctggccaacatgttaaaacccccacctctgctaaaaatacagtagttagccgggtgtggtggtgcactcctgtagtcccagctactcaggaggctgaggcatgagaattgcttgaacccgggaagcagaggttgcagtgagccaagattgtgccactgcacttcagcctgggtaacagagtgagactctgtctcccaaaaaaaaaaaaaaattaaaaaattattttttggtagataactaccaaattgctgtctataaagctgtcactttgctggccttgacttaagtggcctcttagtacacactgccattaacgtgggttgaagttatctaaccgttttcatttccaatcacagatgtggttaaaatcttttgaattttttttttttttaattaaaaaagtttgctcacgcctgtaatcccagcacttggggaggctgagctgggcggatcactgaggtaaggagtttgagaccaacttggccaagatggtgaaaccctgtctctactaaaaatacaaaaattagctgggcatggtggcacatgactataatcccagctattcgggaggctgaggcaggaggattgcttgaacctgggaggtggaggttgcagtgagccaagattgtgcctctgcactccagcctgggcaacagaacaagacattgtctccaaaaaagaaaaaaaaaatatgtgtttttgtagagctatgttttgctatattgcccaggctggtcttgaagacctggcctcaggtgattctccaccttggtctcccgaagtgttgggattacaggcgtgagccaccacacctggctcttttgaatgtttactgtacatttttagtctcttgtgaattgtctgtttaaatcttttgtatttttctactgaaattttttcttactgatggaacatttccttccttccttccctccctccctctctccctcccttcctcccttcctttcttccctccctcctcctctccctccctctctccctccttccctcctctcctactccttccctccttccctccttccttctcctttcttttcccctccctcccttgctccctccctccctccctttttttttttttttttttttgagatggggtcttgcagtattgcccaggccggacttgaagtactggtccttccacctcagcctattgagtagcatgctccactgcacgtagcctgatggaacgttttgtaaataatcctcagtctgtcatttgtctttgtacttcattatggtgtcttctgccatatagaaatttagcatttaatgtaaataataccaccttacccgggcacggtggctcacacctgtaattccagcactttgggaagctgaggtgggcgcattatgaggtcaggagatcaagaccagcctgatcaacatggtgaaaccccatctctactaaaaatacaaaaattaaccgggcatggtggcgtgcacctgtaatcccagctcctcaggaggctgaggcaggagaatcacttgaacccaggaggtggaggttgcagtgagccgagatcgcaccactgcactccagcctgggtgacagtgagattctgtctcaaaaaaaaaataataataataatgataataccacctctccctcagaattgtatgttgtacttagaaaggcctttcctacttaaataatgcaaaagtatgctctagtatttttttctaggatttttgtggctaaaatttttatctttaattcatttaggacttatttttggtatagaatgaggcaaggacctgattctttttcccttatggggaaaaaaagtcacaatactatttatccaataatttttttcttatggaaatataattaacatgtccatcaccatcacaccttttctttcttcttcttcttttttcttgagaccgagtttcgcacttgttgcccaggccggagtgcagtggcgcaacttggcccactgcaacctctgcttcccgggttcaagcgattctcttgcctcagcctcccaagtagctgggactacaggtgcctgtcaccacgccctggctaatttttgcatttttagtagacacaaagtttcgtcatgttggccaggctggtctcgaactcttgacctcaggtgatccgcccacctcggcctcccaaagtgctgggattacaggcgtgagccaccgtgcccagcctctgctttttattatatttttcctttttttttttttcttttttgccttcctgtgcagaggaaacactattttcttctaaagcttggtttctgctgaccagtagcaatttttaacatcagtctgatttccctctgtcagcctataggctttgctgggttatctctcctgactaatttgtgtagcaacttcacatgaatttaaacatttgtatcatcagttaacactcactttgaaaatgttattgggaggcttgttaagtcaggtgtattttgtgtgactgctctacactcaggccttctggaaaccctgcagagggtagctctagtggccagctagctctcttgctgaaaatgagcaacataagtacatgaaaaacccaacaagtaggatttgaaagcggggctaattgtacccttatttcttctggggataaaagtcttaaactttgtttaaagtaaaatgtttttatttctgacggtgatttgtttcacttaaatagcttgttgtttgtttctttcatttctcttaagttttgggttgggtttggtttgtttcccgcaagttttgcccgtgccgccttcctccttgtgcctgcagggacatttgctggtgtggcagcctccaggcccgtccccagcctttttcttggcacaccttctctaggatggctgggacagtgacttagcttctacacctgtgactaaccattttcattccattctacagctttgacaattattctgccaatgttatggtagatggaaaaccggtgaatctgggcttatgggatacagctggacaagaagattatgacagattacgccccctatcctatccgcaaacagtaaggattgcagctgacttttaatgtgtcttttagagtatataattctcgagcgcttaattagtgcatgttacctatggacttgcttatattgccatcatttgggtattgagtaaatagcaaacagggtgggattggttccatgtaaacatccccctagatgcaagcccaggggttttgtgttttgagcgttaccagctgttccattgttgggcattttacagtcttccatttagctttagaataaccgtatgaaagagctactttttgtttttgcaaaccagtttttaacaccaattagtttgaaggcaggtttgctgtgtgacatttttgtaccacagaatcaaattaggcagttaagattcaggtttctttaaaccaagttagtaactaatctcacaggtttaatacattttttcccacaaaatacataatttgtatggattttgtgaaccatacaatagaacctaaatttattcaatgtagattgaagttttggttttgtaaaatgtatccactgtgtctaatcagaaaaaaaagtttacttttgcttctgtatcagacaactaagtgatttatttaccaaagctaattagagcagtagctggtgaaaatgggtacttagaagacattgttgtcattaaaagttacttttctttaagcagcggttttacttgtgtatcatttgcttatcttgttacatgtttgttcttcatttttaaaagtatctttggaagcaaaagttaaatatgcttgagattccttgggttgataacctgtgtgcatgtcctagctctgtgacttcaggcaggcttcatcctctctccagtctttgcctgtttccttgtagggtgagatgagtacgtgtcacgcacgcataacagtcctgggcacatagcacacactgtggggccagccgctgtcagaattctcctgttcctcagtgtgcgggtgggtcggcctaaagagtgctgctttccacgttgtgcccaaatgagtggaagttgtgtggtgctcagcacacctgggttggccggagggattggggttggggttgggttgaggtcaggaagacatcctagagaaaggctggctttgagccctgattgatgatgaggcagcctgtgattgattcaaccagtacttcgttgtagggggtaatatgggtgaaataacttagtggttaagtctgctgtattaaaaatcagtctataatccccagacaattcaaattcttcagtatcttaggaaactcttctatacccagtggatgtttaataattcagattgtaaatggatttaaaaacatactggctggtagagtaggagacttcagcccactggacacatgtggaagggtgtggtgtcattctgagaaacaagagccaccctgctgtgactcagggggtaccgggcagggtgaggcctctctaaggaaggcctcacagtaagtcaagggtgacttggcaggagtcccactttgtgttctgaggaacacacagataaggaaagagaactctcctcagcttgaacaaagctgtagagtgtgacgcctggtatcaaagtaggtgttgtcctcatagggctagaacttaaacttcatgtttcctctgtgtgagactgtggactgctttcctataaaatatttgaggagcaaggagggagtgggacatggttcttgccctcaggtagttcacagaaaagtcccataaactgtgtaagacaccctgtgctagcaagggggtgagccgggcgcttaaggagcaagaggggcgagcacccacccagcagtggaagcattcctgtctggactccttcagagataaggaaattatcttgacaactcaggggcaggccacagatgctcagataccagtgtctggaaggtctcatccctttgagccacactgtcctaagaagaactggatctggtagtaacatgctggcacctgggtctcttgttgataaaggggaaacctctaaattttgtactacatggaatgtggtccctgattgctggctctgtggtctgcagacctgttgatgtagctcatccaagactgcttagacactctcctgaaggaccagttggaagatttcttatctagggtgtcctaaaaagagatgttacatttcttgtggtcatttaacattggcatcctctctattgggcagctctgtcgggctaagtctgttcagaccattcatttcttcttcgttctccaaaagatggtgagcaggtagtcgccattcttagttgaaattgcccttcaggtttttatttcccgaattacgtaatccttacattattttctcttgaaaatctttgctaagttctgcatactcatcttcagttgctatgcacagaatcaagtcttgtcagagtaacgctcaagtccagcatcttcccttgtgtagatcacctgtatttatttgcctgcttgtaccagcattggtggtgtgagtgggagcctaagtgacctgtcagtgtcacagcgagtcctgagccctgtgtgtgtcctgagactcaggctgtgcagcgggttcgctgagatgctgagcctccatgttggggtcagccaggaccccagtgcgtcatgccagttgtttcattttctctctaggctaaaagttgttgttgttgttgttgttgtttgagacagagtttcgctcttgttgcccaggctggagtgcaatggtgtgatcttggctcactgcaacctccgcttcccaggttcaagtgactttcccgccctagtctctcaagtagctgggactacaggcatgtgctaccatgcctggctaattttgttttgtattttattttttttgagacggagtcttgctctgtcgcccaggctggagtgcaatggtgcgatcttggctcactgcaagcttcacctcctgggttcacgccattctcctgcctcagcctcccaagtagctgggactacaggcgcccgccaccacacctgactaattttttatatttttagtagagacggggtttcaccatgttagccaggatggtcttgatctcctgagcttgtgatccgcccgccttggcctccccaagtgctgggattacaaattttgtatttttagtagagacgggggtttctccactttggtcaggctggtctccaactcctgacctcaggtgatccgcctgcctctgcctcccaaagtgctgggattacaggcgtgagccactacgcctggccagtgctagaggttttaaagtggtgggctagactcctgtgatggtagataaaaagaaaaactgtggtgttcagcttggcagttttgagtttcaaaaggcctcagcttttgtgaggttggctgttacaagtgcagccagagagcaccaggcacacacatgtggttccgcagaactagagttgttactcttcgccgcgagggaaacacgcacctggggactgtgggaattcggccctcactcttactggccgggagcaggggatatttggtgatttttgtggtttgtatgatgatcttggatttgtcactacttagaaacgattatgagttgttttttttaaagtttacttacttttggtcctatttcagcacagtcacacaggtgaccttctctgatgttagtgttctgcgagattattctattcaatagtaacacctccaccagggcgaagctgcgagtgccaggctggttctcatacgtcagggctgcctgacccttttacaggattacaggcgtgagccactgcgcctggccagaatgtctgtgtgttttaaaattccaaacttgaaagtaaaatccaggtggatagcatttggaagagaataaaacgaagtagaaacaacactacttttttgtagtgagatctcagctgtccagatgcccgccctgtcttactccatggaaagtggacccatctgttgtggatggttccaccagtgggcaggaggctgtgggaagagcagccctggctacacttaccaccgaggagggagtggtgtgtgatgcaggagtaacaaaggcgttgaaggcaccacgtgtgtaacaggcacgcgggagtctgggttagtcagaaaggggaaagcagtgctcaggttgactggaaacataggccggtgaccggagacagcctgaggctccagaacacacaagtgacctgtgaggaaggaaactgagagaccctggagagacaccggtggtgccctctcaggtcctcttgagtgttacgaggacggggaagaaatagagcctcccagccagggtcagccagcacagcctctgtatgtgaagcgtcaggacagcgacggccgggaggaggggatgctaggaagtgagtaccagaagcactagacagggttttgggaagctatatttagctggggacgaagaaggaacaaggaaggaacaggcagatggcatagcacgaacgccgggtggaaagtggaactgctcgctcctgtcgtgtgtgtctcttctccatcaaaaaagaggctcttaaaaatcgaaagcatgccacagatacgatcagaggctctttggaagctgcatttttgtaactggttctcgatgatcctctcccatggtaaagatttggcaccatatgaagtccttgggaggacaaatcttcaacagtagcccatagatgaaacccagatagctgtggaaactaatgtgctctttgaatgttaagtcaggaaagcttgagtggcctggcacggtggctcacgcctgtaatcccagcactttgggaggccgaggtgggcggatcacgaggtcaggagatcgagaccatcctggctaacacgttgaaacctcgtctctactaaaaatacaaaaaattagccgggcgtggtggcgggcacctgtggtcccagctactcgggaggctgaggcagggagaatggtgtgaacctgggaggcggagcttgcagtgagccaagatcgtgccactgcactccagcctgggcgacagagcgagactccctctcaaaaacaaaaaaaaaaaaaaaaaagaaaagaaaccccgtctctactaaaaatacaaaaaatttagctgggcgcagtggcggatacctgtagtcccagctactggggatgctgaggcaggagaatggcgtgaacccgggaggtggagcttgcagtgagccgagatcgcgccactgcactccagcctgggcgacagagcgagactctgtctcaaaaaaaaaaaagaaaaaaaagaaaaaaagaaaagcttgagtgagatgaaattaaaataattttctcattttgagacagggtctcgctctgtcacccagactggagtgcagtgtcacaatctcgcctcactgcaacctccacctcccgggttcaagcagttctctgcctcagcctcccgagtagctgggattacaggtgcctgccaccatgcccggctaattttttgtatttttagtagacacagggtttcaccatcttggccaggttggccttgaactcctgacctcgtgatccacctgcctcggcctcccaaggtgttgggattagaggcgtgagcgcttttcttaaaagagttccagggttctatgttggaagagcgagtttgtcagtttttattggaacaaagaaatgaattgacagcattgtgataaacactggaagtgtcacttctaaaatttgtccatggctgaaagtggtggctcatgcctgtaatcccagcacgttgggaagccaaggtgggtggagcacctgaggtcaagagtttgagaccagcctggccaacatggtgaaacctggtctctactaaaaatacaaaaaattagctgggcgtggtggtgtgtgcctgtagtcccagctacttgggaggctaaggcaggagaatcgcttgaacccaggaggcagaggttgcagtgagctgagatctcaccattgcactccagcctgggcaacagagcaagactccgtctcaaaaacgcttgtccttaaggggtggcttcccccagacctacaaagtagcccagaattggaggtcttagtgtcagcaacagtgctgattttgataatgcaagtctgtacattcaaaccagtctcccagaactaggtggaagataggaacatttctgcataggagacttggaatgttctggcagcattaaaaccctgaggcccggctatgttctgggagagccctttggcaggcatcatttacagacgggtccttttcctgtatgctgtggcttcaactaggctgtgtctgagaactcggatggagcacttgaaagtgcccgtggctcccgcctgcctttgcggtaagggacagtgcagaacatctccggctgtgccagctgttgtagattctggtgggtgctgccatgggaggaggagcacgttgttgccccccctcaggatctccctgacctctgtcttcaccatcgttgaacttaacgcctgcttttgaccaggtagcgtggagtgtttcagtggcatttgtcatcgaagatatgttagaatctattgtatgcttttggatctctccggagggttaagacaaaattctaataaagaatcgataagaggttatattgatttttgttgtcctcagtctgtactaaactcaaaccaagttctcatgcattactaggttggagaaacgtacggtaaggatataacctcccggggcaaagacaagccgattgccgtatgtaaaactttcagtccacttcagtttcaagctttctctgttctctcatttcacttcgttttcctaggattttttattaagcctcaagctccttgagtgttttatatttaattcactcaaggttggggttttgcttgatgaaataaacttcattagagtgtgatagtttacccaccggcttgaattaaagcagtttgtgaactgtgatcttctcctcccaagtgaaaggaggggacagtgagagggcccctctcctggctggttggagatgcagatatggagactcctcccggaagcccacctggctgtgagccgagccggagcaggactaaccttgttgccggggccttctttctccgcttgggtgtcccgtgtggtggggctgtctgggcgtggctgtgcagtgctgctgagctaaccccaccgtgcttgagatggtgtgctgggtgccgcggtgattcttggacgagcttgtgcatgcgccagcattcttcaaatgccagttataaaaagctgttgtgtgggatgtttctttccctttcaggtacaaggtatcagctggagggttgaaagtgtagcttgggaattgtgtgcatttcataaagtagcataattgcctttttccaggagaatattttagaaatctagcattttagaattcttgggcatttttaaatacaggtgaatatttgaatttggtttgacacaaaatacagaatggatgaagcatgcagatgtttggcgtgtgccccgaagcaccctctactctgtcctctgcacccaccctttgcgcctctgcgtcagccacagctgccccgggagcgagttctcctgaggccctggctgtgctgactctagggcagcgtgagggtggttgtcagctgtgaaggtgccacttacacactaagtcctccttccttgtggagggaagggctcaagtagcaaatattggagcccccgcttggtgctgggagctgtgacaggcagctcctgaagaagcagtttaattggaaccagtgaccatctaaaactgtttgtactctaaaccagattttacagaaatattggaatcatacctttatacttgattttttcattttagatagttaggcgtaaaggaagcctcctgagggtctggtctgatcctcctgatccttgaagagcttccagcatcattctcccttcatgctccccattttcataagtaactggtggcttgacatgctgggtttggtttgggagccctctgacaaactgaaagggtggatcaggaagcgtctgaccacaccactggtagacacgctctgcgtccaacaagtccttcccagcaacatgtagaaagcaaagtgcatgcttcattctaaggttgttgtctaaatgtttccctgtgtttcctttttgtaggatgtgttcttaatttgcttttcccttgtgagtcctgcatcatttgaaaatgtccgtgcaaaggtaggtggggatttaaaatgtgtatgtaagttatagaatgatcctctcagaaataaatactttaaaatatcacttagcctaggaatttttagttatttaaattggttttagcaatttgctacttaagtacatgattgggtttttttttttcttttgagacggaggtctcactctgttgtgtccaggctggagttgtagtggtgacatcagagctcactgtagccttgaactcctgggctcaaacagttctcctgccccagcctcctgagttgctgggaccataaatgtgcaccaccatgcgtggctaatcttaaaagaatttttgtatggctggttttgtagaccctggcttgtctcaaactcctgggttgaagtgatctttcagcttcagcctcccaaagtggtgggattatagctgtgagccactgcatctggcccatcagcagtttattttatttatttatttttgagagagtctttttttttgtttttgtttttgtttttgagatggagtttcactcttgttgcccaggctggagtgcagtgacgcaatcttggctcactgcaacttccgcctcctgggttcaagtgattctcatgcctcagcctcccgagtaactgggattacaggcatgcaccaccacgcccggctaattttgtatttttagtagaaatgtggtttctccacgtcagtcaggctggtctcgaactcccgacctcaggtgatccgcgcgtctcggcctcccaaagtgctgggattacaggcgtgggccaccgtgcccggctgagacagaatcttgcactgtcatccaagctggagtgcagtggcacaatcttgggtcactgcaacctccccctcccggttcaagcaattctcctgcctcagcctccttagtagctgggattacaggtgcccgccaacacacctggctaatttttgtacttttagtagagacggggtttcaccatgtttgccaggctggtctcgaacccctggcctcaagtgatccacccgccgcagactcccagagtgctgggatttcaggtgtgagccactatgcccggcctaatacgtggatttttaaagcttcaggttctggttcagaagtttcctgggtctcattaaaataatgaggcactcagaattggtctaataaaaataacgaccatttctttctactccagtctctttcacaaacttcttagtgaaaatgacaagtgaggcccttcagtaggggcattttcagtggagataatagcggcagacctgagaccttgggctaggtagtttattctcatttctgaacagatgatgaattttctcagatgaccctaagaaattgttttaccaaaaacaaagtgatctatttgctttgggaggaactcccttccttttgtttctcttcccttccccccttcccctgcggttgtagagcccgttctgtccggtcgtggttctgtccagccatgatccgggagtcctagcttgctaatggaacacctgagatgttccttatggctcaaggcttgaattgaaggtgggaaccacctgaagcctccgtggggaggccttgcctgaggttaggtgtctggcatgagtgccgccggctgggtgtgatttaggtgaaggacatctgtaaaggagcgtgtcacaacctctgttccttcttcacatctagtggtatcctgaggtgcggcaccactgtcccaacactcccatcatcctagtgggaactaaacttgatcttagggatgataaagacacgatcgagaaactgaaggagaagaagctgactcccatcacctatccgcagggtctagccatggctaaggagattggtatggaatcctgtgtttttcctcctccttgtacctcttttattgtagtgacagagactggagtccagtctgggaaaggagggtgtgtgtctcccactcagggcctggtgtactcttggggaaccagctggcaaggccctgtgggtcttaacgtcagcgttggaaggtggaagcagggctgggagccggcagaaggcgcccgggccccaggagctgcctcccgctggtggtgtgatcagaagagagtggggtcgagtgtacattgccgtgtggtcgtgtttcctgtaggtgctgtaaaatacctggagtgctcggcgctcacacagcgaggcctcaagacagtgtttgacgaagcgatccgagcagtcctctgcccgcctcccgtgaagaagaggaagagaaaatgcctgctgttgtaaatgtctcagcccctcgttcttggtcctgtcccttggaacctttgtacgctttgctcaaaaaaaaacaaaaaaaaaaaacaaaaaaaaaaaacaacggtggagccttcgcactcaatgccaactttttgttacagattaatttttccataaaaccattttttgaaccaatcagtaattttaaggttttgtttgttctaaatgtaagagttcagactcacattctattaaaatttagccctaaaatgacaagccttcttaaagccttatttttcaaaagcgccccccccattcttgttcagattaagagttgccaaaataccttctgaactacactgcattgttgtgccgagaacaccgagcactgaactttgcaaagaccttcgtctttgagaagacggtagcttctgcagttaggaggtgcagacacttgctctcctatgtagttctcagatgcgtaaagcagaacagcctcccgaatgaagcgttgccattgaactcaccagtgagttagcagcacgtgttcccgacataacattgtactgtaatggagtgagcgtagcagctcagctctttggatcagtctttgtgatttcatagcgagttttctgaccagcttttgcggagattttgaacagaactgctatttcctctaatgaagaattctgtttagctgtgggtgtgccgggtggggtgtgtgtgatcaaaggacaaagacagtattttgacaaaatacgaagtggagatttacactacattgtacaaggaatgaaagtgtcacgggtaaaaactctaaaaggttaatttctgtcaaatgcagtagatgatgaaagaaaggttggtattatcaggaaatgttttcttaagcttttcctttctcttacacctgccatgcctccccaaattgggcatttaattcatctttaaactggttgttctgttagtcgctaacttagtaagtgcttttcttatagaaccccttctgactgagcaatatgcctccttgtattataaaatctttctgataatgcattagaaggtttttttgtcgattagtaaaagtgctttccatgttactttattcagagctaataagtgctttccttagttttctagtaactaggtgtaaaaatcatgtgttgcagctttatagtttttaaaatattttagataattcttaaactatgaaccttcttaacatcactgtcttgccagattaccgacactgtcacttgaccaatactgaccctctttacctcgcccacgcggacacacgcctcctgtagtcgctttgcctattgatgttcctttgggtctgtgaggttctgtaaactgtgctagtgctgacgatgttctgtacaacttaactcactggcgagaatacagcgtgggacccttcagccactacaacagaattttttaaattgacagttgcagaattgtggagtgtttttacattgatcttttgctaatgcaattagcattatgttttgcatgtatgacttaataaatccttgaatcata

SEQ ID NO: 27 - DNA, 248733 bp, synthetic construct
  source 1..248733: mol_type = other DNA
aagagctcgcccagctctgcgggcgccgccaccttcgccgccaccgctgcctttctcctcctcctgtcggcgtgcgggggccgcgcccggcggcagctctgccctaggtgggcggcggcgcggcccaggctgcagctgagcgctctgcgcggcgcagccgggtctcccgcgtgtaccacgccgtgacaggtgcagagtccgggctgaggacccacctgcagccgccgccgcgatgcccaccatgcggaggaccgtgtcggagatccgctcgcgcgccgaaggtaaggggccgccgaggctcggggctagcccggggtcgggaagcgagtgtgtgtgtgagcgtgtgtgtttatcctggaagagaccgcatcctacctcttccccggcggcagtccgactgtcgcgcccggcccctaggggacccttccccccgcgctgcccccagtgtactcgcagaccctttccaggctccagtaccctcgaatgggtgttctccgcgggagccccgaggcgtgctttgcaccgcagtgtgaccattaggtcccagtcactgagctcactcgccctgcccacctccctccccaccagttcgatttccactcagcagatccccagcccgccgcccctgcctccggcgcccaccgttttgcaaccccctatctgagctcccagcgaagcgagtttgcttttccccggctgcaggatcctttgatccgtagtcccttggctctcgaagcgcggggagccttcatcggggtcgggtgccgagtgggttccctgcattacagcttctgcaattctgcctcctgcagcggagtcccaccggctcgcgtctgaggtttcgtttttgtgtttcccttttgcccgaaaccctcacttcggccagctgagctgacttttcagccaggtggaagctgttttctttgctccacctggggccagctcttgaatggccatggttgtcaacactgagcaacagatgctccggggtagaagcaagtaagctttccgagggcccagactcttcatcgtctccgaggagccctcaacatcctgcctgccatgtggcaggcactctgtaaatattatttgattttgctcgcgtcaaagccaagactgtaaatatcccaaggtttgtttgtcctctcccataaacctgtacttgaatcctgcagagggtggaataacatgtttttcagaaatctatcttgccatcatcgctgattcccactcttcctccccacctccatcttttaatgtgagacaggtggtgaagtggttttagaaaaatatataagttaggagaattggatttcagggatggagacaggccattttttctccttaggggctccctgtaaaaatagggtccctgaaattttctgattgcagtatttaggaaatattaaatgaaactgctgtggggagaagacgaagcaagattcaaaactggcctgtgtactacataggaattcggtacatgctgtcatttgtaatacccaaaaaatacttatatagggcattatagttttacatacacagttgaatacattatacttttaaaatgcacactgtaaaaattcattttttttacacttctgagtgaaattagtcatagagatagtgaaagtagaatggtaatagttggtggtgttcttttaaataatagcaattgatgggtcctatattgtgggaaataaggggaagagaaaaagtctgagagcactgcaaaacctgtggcatgtgaggggattacagggctgcagtattgttcttgattggcttgtgtattttccaaagtacttttacaaagattactttatggaaacttacaacactcctggaggttggtgaaggtggagtgccatctgatagttgaggaaactgtggcccatatggtttagtaatttgcccaaggtcaagtaactagttcagtgacacatttggattaagagctctgggaaaacaaggactgctgcttgtttaatctttgtattccctgtgcgtccagcacagtgtcagggccatagtggtgcttggtgagtgaatgaccctttcccctgagattagttgattccagtttattatagcttcagcatgtgcttgggactgtggtgaagacaaataatgactctgtggggctggcgttgtggctcattgcctgctctgcccacacttttctttcctaggaaatatttctttcctaaaaaatatagtcctacctttcctaaggaatattctcctttgagagaggccctgctgcctagagggccttgttctgaactgcagcctttttggcctcagctgattggactatggttggctcctgacccagggtcaaccaattcttatgtgactcagacacttgtaaccttgtggtttggctcaaaaagagtctctgtgttaatcatatctctcttgaaaacattaaagttagagatttagagtaaaagcagaagggagcagaggtgaataggctggtatgggagagaatgggtggccataataagtcatgggaatgctgctgatagaagaaagcagaaactatgagtgagtagagagatagcaaagaaaatggaatggatgggcagacacagatcctgagagagggtggcgagaccttggagcctgccctcccgaattttatagccctagttcccaagtagcattaaaataagctcttttcccccccttgaaatgacttgaatgggtttctgttcccttcatccagattggccagatgtatgactgtcatgcctgtaagttgtttacaaccaaactggggagaaaggacttaaagagggaataaatagtctaagaggggatgttgttaattaaatattgtgcatgctgtgggggacgcaggacctgtggaagattaggaatttagtacatacttattactgaacataaggcctgctgagtgaacatttcattgaggtgtgatttgagatgagccctcacacagtgcttctcaaactcgaaggttcataggaatcacctgaggatcttgttaaacgcagagtctgattcaggaggtctggagtggggccagagttactacatttctgacaagaatgtaatgctgaaggatgctggcctgcagatcacagtctgagcagcaggatcctaaaggatactgacatctatttctgtagttaggagagtgttgaagacagtcataacaagaacaaatggggaaagtgaacatggcttatttcagagttcttaaggaaattggccgggagcagagggaaacttggaaggagcaggctaaaagtttggataggtagattactgccagattacaaagcattttaaatgccaaggtgagtcatttggacacaggaccgaatatttgaacaggttcttagagttcattgaatctaatttcttatttaagcctaactccaatatataatatctaacagggccagttgggggccacatcgttataagggagggacatcctaaaagtagtaacttagttaagtctggaagtgtgttggctggtttggaggaaaaggtatggtagatagactcttttgcaaaacagtcttaaaatgacaaaagtcagaattagtattagagtggaacagtgagaatgggaagggaggaatcagatttctgactgaatcattaactcattcagcagatgtctactgaacttcaactactgttacaggcacttgggatacatcagttaacagaagaggaaaagcatggccctggaggtgcttactttctagtgaggcaggagacaaaacacacacaaaatatgctaattatagaatttgttgtgtggcaaatggggaaaatgaagagaaagcaaaatgtttaaggtgggtggatggattgcaattttaagtaggttagttagactagccctcattgaaaagttggcatgaaggagataagggagttggcctggtggggatctgggggaagggtgttccagccagagcaaatgccccaaggcaggagagaatcgggaattaggaacggtgaggggaagaatagtaggaaatgaggtcacaaaggtcattgtgttagtccgctcttaggctgctaataaaaacatacccaagactgggtaatttataaagacaaagaggtttaatggactcagtttcacatcgggaattaggaacggtgaggggaagaatagtaggaaatgaggtcacaaaggtcattgtgttagtccgctcttaggctgctaataaaaacatacccaagactgggtaatttataaagaaaaagaggtttaatggactcagtttcacatggctggggaggcctcacagtcatggcggaaagtgaaggaggagcaaaggcaaaagagcgtgtgcaggggaactgctctttataaaactatcagatctcgtgagacttattcactgtcatgagaacagcacgggaaagacctgcccccatgattcagttacctcccaccaggtctcttccacaacacttggggattatgggagcaacaatttaagatgagatttgggtggggacacagccaaatcatagcaatcatattataggactttgctatttagtgaatatttagtaaacatagggcaggagagagaaggacttttttgaaaaaagcaagtctcaacaataatttagaattctaatattaataagttaccatggatcttattggtaatagcatattgatattttattagtaataacattggtagtaggttcataaattatcagggatcttattgggctggcttgtgaagatttagttgagtaaatctgtggtgggcttggggattcgcattcttaatgagcctcccaagataccctggtgctggtgaaacacattttgaggaaatttccattacagtcttgagcttgactggttgagaaaatctattaaacaacaaggaaattgggaaggaggactaataaaataagagatgatactaattcaaattttgaggtaacggggacatccaaatggacatgttttaaaggtagttggaaatttttaggtgagatgtgggaaacctcaaacttgggaatcttgagagacaatagttgaaaccctgatagtggaaaaatttgccataaggcaagagtagataaagcagaagactaagaattttaggtctctttatttagctgccccagataaatcaaatgggtgtttgaacttagcatttgaaatctggaaacagactgaaataatggtagcttacacaaaatagtttttctcactcctgtaaaactagtgtggaggtagacagggttggctgtgcctgctacacaaagtcataagggatgttggctccttgtgcctttctgcttcactgtcctgagagtttgtcttccataaagtcacagcatggttgctggggtgccagccatcatgtacaatagttttagccaggagaaaatggaagggtgaaaggcaaacaggtttttcagaaagcaccacacaaaaactaatgcttattttgcattggtttccacttgcagggcaagctgggaaatggaaatttccagctggacacattacccagtgttgtgttacaaacggaaaagggtgtatggttattgagcagtgcattagtccattttcacactgctgataaagacatacccgagactactcagcttggaattcattgtatcattatcagcattttgggtcaaagccattcaacaagtctctagggagttccatactttcccacattttcctgctttctgggccctccaaacttttttcaacctctgcctgttacccagttccaaagtcatttccacattttcagtatcttttcagcagcaccccactcttctggtaccaatgtactgtattagtctgttttcatgctcctgatgaagacgtaccgagactgggcaatttacaaaagaaagaggtttaatggacttacatggctggggaggtctcacaatcatggcagaaggcaaggaggagcaagtcagatcttacatggatggcagcaggcagagagagcttgtgcaggggaacttccatttataaaactatcagatcttgtgagacttattcactatcacaagaacagcatgggaaagacctgtccccatgattcagtttcctcctactgggttcctctacgacatgtgagaattgtgggatttacaattcaagatgagatttgggtggggacacagccaaactatatcaggcagacaacagaatcagtcacagtgaagttctcagattgccaaaggctcttgcttggataacatagaaactgctctggagctcatactttacatataataaggattaaattgttcagaactaaagaaatgcacacacacaaaaacttcacatacctatccagtggtttgtgttttcttctgttgaatactataatgctaaaatataatgacatttatttgattatgtaaaatatgtgctaaacgatgtatccagaagttgttttaggaattgtttttctaaatggcaactctaaaatgtttgtaactatgtagaatagtatgttttatttacataaaaggtaacaaaaggaataaaaagtaatttaagctgtccttaaaggaaaaattttaggacgctattccaggtaaaagatgactaaggtttttgttcctttaaaaaccacttattatgcaccagctgtgtgccagctaaatgggtggtgggacaaaaggctgtggtcgatgaaggaggtcccaaaggaaacatggagatgagtatggagatgagttcagttttacctgaagtggcactgtgtgagaaggtgtgtatgagtatagcgatacagcatgtcatcaatatttgaaaatctcaaagtaggtgtcattttacttagtgtaattctggagatataagtgtattagatctgattattttaggttttctatcttcagtgcagaattcatggtttgttttttctgtcatttcaaaaacagaattgaagcatatacctaatgttacagctgtgggaatgtttgcaaaggtcagaggacacttttgaagttaacgaaatgtttgctgcgtgggtctctattcacatggtttcattggaatgtcaatgacatgaaggccaccactttccccttcattctttacttcttagcgaaaggagcccaaaccttccaatgattgtattctccgggtagtaagctccctaagggcagggggttttgtctggtttgtccactgatatattgctccccatgaggacattgcctggcacatagtaggcattggttaaatgaatgaatctatgtcctaaagatgaaaatgccttataatccaatttgtaaaatactcagagctaaatctagatgtactaaatctagtaccctcctactgaaaccttagcaccccaaaggagcgtttttgtgagatttgttcgctgctgtaccctctacacctagagttttgtctgccacatagccaccactctatatttgttgaatgaatggataactctgagctttgtttttaatggaagagcttaactatgagtcttgatagaagtactgcctgcttactgggaaaaactcatgcttcagaaagtcttgcaggagagagtaaaattcatcacaaactatgccatccaaatataatcacattgtgattataaacttttatatacttcatataaatttatatatttacaatgttagaattttagtatatgtccttcccaactattttccagaaaagatatatttgttaggaagaatgaggtaatctgcattatttttaataattttatggatatctgtgccaatatagatttgtgtaaattttgtctactgtcactagttatatccttagtgcctggaatagtgcttgacacttggtagcagctcagtaaatttttgttgaatgaacagatcaattttattaattttatgacagcttagcatttttatgttagtacagaataacttactaaagaaccctgtgggtggacatttaggtcatttcagttttttaaactcttgaataagcatctttgtatctttttgtacacctttctgatggttttgttcaaagtccctagaaatgggatttctgggtcaaaagtatatatctttttatgacttttgatacatatttgaaaattgctagaaagattatactggtttacactcccactgaaagtgaatgagagtgcctgtttatcccttttgcagcactgtatagcatttttcttcctccttatggatatagaatgtaaaaagtaagtctttaagtttacattgctttattaggtttaacatattttggtaaatgtagtgattatttttttctgaattgtttatcaagttttgtattgaagtttaagaacttatatgttaacgataataccttttttccttattcatagtttatcttaactttgtagtgctttaacatgtatgtaaattaatttttatgaagtataatctttcctttttttaaatttctgctttaatgtcatatttttcaagataatttttcaattatatttttcttttagtacttttgggtttcattttaaacagttatattagtaattcctgtgtgatttactttgtggtgaaatgtgaggcctggatctaagtttttcctcaaattatttacctgacataataaccatatatttaataatcctttcttcccacactgatttgaggtgcttccgtatgtatatatttgagtttttttctggagtcagtctctctttcccttccccccaccccacccgccgccacctctctttattttggtcccttttagcccctggtatcaaattcctttattgcaacataacaaaaaatattctcttagctgtcccatttgctttgctcttttctctaggtttttctgggttttctttcccccacagttgtatttttctactagaatttatgagtacatcattgaatcaagttaaaaaacatgttggaatatttattggaattgcattgtttataaatttatattaagagaattggcatctttcttatattgagtcatgtatgcttagtttccctcttcaattattgctactttgatattggtatcagtctgaattcatttcagtttttcagttaatttttgtctctgtaggttttaaaattatattgtatgtcttaaagcaaagtatttttaaatgaggttttaaattaataagatttgaccaggtatctgttggttttactactttttgagcaagaatggttcatttctatctgctgatgtattgtggactctgcttccaacttaccacttttattatttcatgtagtggccctgacatgatagctgagatattactcttttttctcctttttgctaggaataaggtcaaatttagaccaactagatttagctaatggttccatggaatctacttacaaatcagcatttatatctcagatcagcactaaaagaaataaaacgtgagccacaatcaagcagctacatttaaaatgtaaaaagagatgttaaatgaattttaatactatatatttaatattaaataatacaagtaatagtgtatttaatatataaatactaatatgtattataaatataaattgtctttggcccaatatatccaaaatattatttcaatattttgttataaaaatttatgagtggtagtttacattttttgtgctacgttttctaaatctggtgggcattttatagtgcatctcaatttgtactatttcatgtgctcagtagctacatgtgactagtggccactgtattgaacagcatagttgtaaattatacctctagcatatgcttacttgttaggatttactagaatttttcagaatataaaattttgtgatggaaacccatagctcaaagtaagcttgttagaaatacatatgtagatcttgaggtttaagtcttcagctcccttcttaacaacagaaggcagtcacgtgtgtataaaacttcacacattatatgggtgcttagataatactgcctttgacttggcagtttagaggttttatgtaagtacattgtggcatcttttgtagcctgttttgtttccaattttttaatctcttataaaatatatttgataaataaaacaccctgccatgtcttcctattcatttttatttaaatgttagcatgagatgtgaagtagataaaactcttaagtagtattcttttatgtacaatatcaccatcacttgtgctaaagggacaactgtatagaacttggcttcatggattaattagacctctaattgacttggcaaagagaggtgtctgttttaaattgagcctctgttcattattttatgtgaattatctttaaaagagatgactgatcttgatccatctagggctgtgcttaataatatcagattagttgagtgacagctcagaatgtcactaagaaggccaaagccagcctgggttctggaccagagcaccactttagtgggccagacctgtttagagtacaagattggcctttgtgagtgaaacaagcaaacaatggtatgcagggttgagtcaaagagatggtttgttctgatgccagcctacaccagttcagcttctgtaattgacctaggtccctgtggttaattctggtcctgaagtaaagctaacgttgtataaaacaaatcttccagcttctacagaccgtctttttcccgtgtcccttcctcaatcccacatagatttagtcccaaaaatctttaacgtcaacatttgaagagctctgacttagcactctaaagatgaggcatgcacaccctgtcaccacttccctgaccctgagtgcctgtcccagcagcttatagagctccaggatgggggggcctgccttgctcttggcaggacaagatgctggttcccaaccctagcttggactccagtgctcagcatttgtgagccgttttgatgccacgccaggcctaccaaggtttctgagtatcatttgctttcactttacccacagttgcttttggccagctcacctgaacccacatcgttgccccatgcaggagatctttggttctgagtgtaggtgttgcccatttccatttgtcctggatctgtcgctccaccattgtattgttattccagtggctgcgactagttggccctttccagttcccttctagtctgtctcactctacttttttttttttctctaacctaggccatgttctgtctctgaccaaagaaatgagatgggtctaagttttatccaatcctggtggctgctctacatgttaagctgggttcagtctaccatctatgccagaatggttgtgataaatattctcagatggacttaagtcaactttcctaactttattttcattgtcatgggtaaatgttagagaaatgacatggggaggaatgtctctgctatctttaatgaaaagtgtgtccaatgtggacagggcagtgggaggcttgtgaaatgtaaattgtttttatagccacatcgtgtgatgctcaaccctggcttcatagtgaattagatagggagcttctaaacaatacagattcccagacccatcccagaacgatggaatcagttggtctgttctatagggatagggaccaagcattaatattttatctcctaggtaattctcatgtgcagtggtattgaaaacactggtatacaaccttgaatttacttgctggcagagaggatgggaataaattgtatacaactatataggttgcgagccaagaaaccaagagtattagctagccaagtgatagacaagcaatttacccaaaatatttaccaaagaaaatcaatatttttggtaaattgtgtatcatccagttagctaataggactaattatactcctcttaatttcccctctcagaaatgatcaaggtcatacattaatactatttattaggttttgaagactttctttaaaattctgaattgaacattcaattcagtacaactaagtgaagagtacaacacatttagtttatttttagctggtgttatatctactctgggagcttgttcaatatgagcttttctgcagtgtcattactagttttttggtaacctgcttgcttttagtatgttgtagtaattagttgctttattcagcctatatttgtagcccaaatatttagtcatttgcagctgaaaaaaatagcataatgacttggtaatagtctttgaaatttctgtggcaactttttttttttcaaggagtatattttcgtcagtctagatttattgatttatcccattatgacatgaaataatcttttataggttaacgtacaaaatgtgaaaactcccaatttacctgccttccctaattgctgagatgaggccaatatttgagactctttatttggccattgtgtttctcggtggccgctctgatgggcgctgggttctagctttaggatgctgctggtggccactgccgggtgggaagattatcacttgacgctctggggattagaaaaacaccatagtactgtagatcaagtgcattgtgtccagcattcgtgattgctgtttattttatagttctcatctatccttatttgtctctgcatttagactttccttttattaggtgataatgtgatttgtactttgcagatggaaattattttcaaaagccagaatttgatcttgtagaggttggaaagttctgaattgttggctcaatttaaccccagatggcaactgatttctgtctcttcgtttaacgttcagtaagagaatcattacatgagttggccttttgttgacttccaagtgaatacaattagcaaaagaaaaaactctcttaatttccccaggtaccaaattgaatcccccttgaacttattaagtgaatttcccggtggaatttatccctgtggttggtgaaccactctcctatatattttcattttaactaagccttaatacgaaggccttcagtctgaacttagtagatttctttataggtcagatatttttccatatgttcagctaaaattgaccttttaaacaaaaattcattgaagcaaataaatcaccattgttactgtttgtttcatgtgtttttggtctgctcagtaccagatgacacggtagccacctgcaagtagggcttttttgttttgtgacataactacgcttgaagctatctttaacatcctaagctaatgccctataaataattggcgagaaagtgaaacaaggcactgggacttcctgtaggcctggagtgatatgtgtgttctggcccttcaaagctgtgcggccttgagcatgtcacttaacctctgtgagactcctgtttctctttgataaagtgataatacctaccagcgaatcatctgcctgttggatagtgaggagaccaagcctggctacacactggaatctcccaaggagttttcaacacactgacccctggtcccacccccagggattctgatttcatcttgggggtaagggttgaaacaaggagaaatgatagtggcttcaactactaagcatcagtggacatgatggggagtggtcaagattcagaatataactagaagatagatccaacagatttgttgatggctaggttatggaattttaaaaaaaggagtcaaaaatgactaaagttttgggccctgagcccaaaacagtggtgccatttaccgaaatagaaaacactgggatgaaggaatgaaaaccagcttgcatcttagaaaggagtgagaaagtcccatgtgtcaaaaatacatatgtttgtagacatttattttattctcttagagtattgcattcatcctaaaatctggatttcagaatttccatcttctgtttccctcatcttcttttctctgaatattctttagaatttcagtaaatgcacctgttagtgtaatacgtgttccccattgctatgaattttaggtatctgggaactgtatggatttattctgtttgggatcgataattacattgccaggactttttgctgcccagtcagagttgatgagaacagtctttcacgtgatcactgcgttcttttggctcttgaggtgctccaaactgcagggacattttccagagtggatatattaaatgaaagcacttactataaagtaggtgctaagcaaatgttttttgaatctgcatctggtgagtgactgggataagatcaggctgttcagattttggaaactgaacttttaaaaacgctggagtggttttgaagtcttcgtggagttttcttatattcatctgtatgcccatcacaccttgcatggcagtggtcacggtataccagcaggtctagggagctaatttcatgattctaattagtagtagtagcatcttgaggtaaaatgttgcattaggaggtacttactgcatggagtgatttttatttatggcattagaaggttcttgaagcatttgtttcatccaccctcgcatcgtttttgttctacctgtggattgagtagggcgtgcggcaatctcacacatgtgtaggtgtcattgctttaatgtcactgagcaatgtgctgggtcttttcagtctttgcagcccaccagctgtcattcacacatcctatcttaatctgtttagtggaggtttctgtcgtcttctttagctacatcctgacaaactgaaggatgccgaccattccttactttgttttgtgaaaatgattcttggctttttgagccagtctcatctgaccagtcttagtgggttcttcagtactgcccacagtgcttgtggtagatgagccatcccagagccacacccattctcagagtctcgttagggtgtgctggagttcttggatgctcttttgtgggtttcctctttttctagctttgtttaatggatttgttggatatttggcaaacctggttgtggcattgtgttatcaacaggcagatgagagtgtcacactttccttatcctgggtaatgtctgtttctgtaggataaaacacttgtcttgtttgtggacagtgtatgttgctgtgtgtgctatactgatgtccctaccaaagttgtaatgggcaggaagactttagtttcttcactggatgtttttgatgattgagactttgtttaaaaaaaaaaacaaaggtgagttgttttcctctcttgcaaagtcacaatggagataagaagcaggtgccagttaaactccactgactcattctgagattaatgtagcagcataatgatgttatttgggtgtttctgcttcttgtaataaaacgaggactagtctgttggaactaatcatatatctacctgtttgtatgttataaaatgtgtaaatagctctaaaagttaaagttgtaatgattcagataactttcatcattgttcattcatttttttccccagtactttttaaggcctagctcattcagagctgtaattcagttctatcttcctatgaacacactgctactgaagtcaatggggttaactatcctacaagcatttgtagtaactaatttaataatactcttttccatgtacaaaatgcggaaaacttgcgccctgcactgtatcagtggttctctcaataagcttatagttgtcttaaaaaaaaaaaagaaatttaaaaggatagaatccttggattctagagttggaagggaacttagaagtcatttaatgcaacacagtaactgatatggcttgaatacctcacagtgaagggaacacacccacacacacccttttaagacagcccattccattctcagacacctcagattttttcttgataagaaagcaataaaagcagtaaaaacatttatgctctacatgccttgctgggtcaggtgtctcccatattgtatttacacagttgcttctttaggcctttagtatagaaccttcaacttattcagcctttcaaaatcttctagaattctgatttttttcatgtcatctgtacattgattaatcgtgtcatgtgtccttatcctgtcattggaacccaggcagtctgcacccagagcccttaccaagttaggcatttactgtaagggatcctcttgtatcacagcagaggttcattgttcttttttttttttttttttctggtgagggggaagtctctgtacgtctgctccttcacttcctaactttggcatgcatgtggcttcagagtgccatgatgctccctccagcccacctgtccgtgatgttccttacttggtgctgagttgactgaccacaaatccacattctctaaaagggatctgactggcctggctggtcaggtgctccatgttgaccctgacacctagggctcaggtactaggccaggccaggagatggaaggagagaccgagtccaagggtgacccaggggaggctctttcagaagggctcacaggcagggatggccaaagaatagctttagtatgtgagacccctccatgtatgtttgtcagctacatagttgtgaatccacattgtttcataatcatggaatcgtgtgtcttcatttataacaatagggcctacacaaaagccttcttgaaatccagatgctgagggttctatttttgaaaagaaagaaaagggatttagtcagtggaggcttactgatccccaccagtcaccacctcccttttaagcagtctgttaatcagctgcacttaatgtttgactagcattggcctcaaactcattggccaatagcattattattcagacttatctaatgtaaaggaccttttttagaggaaacatttctttttggtctttgagaatatattctttgtatgagaaacactgctttcaaaataattaagctcagttccatgtttaactgaattctcagaaatgttcttttaacttctgaattttcagatctttcccaaaaatcctttagaagcagtggatctcattttgtaaatctgtgaactttgaaagcacatctgtagactcccattttaaaaaacagtggtttatgatctttatgatccatcttctttttagaacactgggagagtgcaggtggccctccttatccctgagtttcacgtccatggattcagccaatcatggatcaaaagtattcagaaaaaattccatagagtttcaaaaagcaaaacttcaatttgccacacaccaagtactatgttgaatccatgcaaatgacgtgtaggcattgtgttaggtattataagtaatcgagagatgatttaaaatatacaagaggatgtgtgtaggttatttgaaatactacatcactttatataaggtaattgagcatctgcagatttggtaaggggtcttggaaccaatcccccatgcatactgaacgatgactaaattgtcttcatcttttagttcctctctcattcaccatagttcttctctgattagtaacagttcacttaactattttgcaggttctcacagttctgtaggttagaaaataattatatatacctacacatacatatatgtatttactataggctaggaattcatttagagcagttaggtgctgatttttctttttttccctcttaaaataatcccctaccttgtcttttggtttagttcttcgaactaatgttcattctaacctttccagtcttaagatgattatccttgatagacgattgaagcaaagtagatgttggagctgagaagttctgccttttattatctgttaacaacattgtatcatctattctaggcagcaggctcatctcatcaattctttgtgtcccagatgaaagggggaaaaatcgagtggtctctaacgttttttacaacacctttcctccagtctcagatgtctgtgcatctgttaatattcactgttgaacatgtgaacctatctattttcaacctttcctgtgatctttttttaatcttgtgcttgttcaagtacttcctgtgaagcagcagtggtctctaaatacaactccttcaaccctccctgaccacctccccgccttgtcagggccttccacaattactcagcatgtgggtttggacagctgttggggcttctgcactttgtgggtcttgataataaattgaaatgtgccctcctgaaatccagaatacatatctgacatggcctggtattcccctttgacagtcaaaaactctttgatacagttattttttgaagagtatcattactactttaccacttttgcttggattagaatccagtccgtagtgtcagtctgccttgtttcctgtgcatttttagaggtgaacttaatgccactgcaagtcagtggtgctttaagctaattgagacttctaggagatgcttggtagatgtctggtggttgcaacccctcgtttctggtgcagtctgcttctgtgtcaatttttaaacatctatgttggcaaatatactatttaattcttctgtcagataaagttatctgtgggttattcccaaggagatgtcattaaattccttctgtctttcattgttctggttccttttccagttaagcatgaaatggcgttagtaaatgttttattatttccaagcaattcagcatgccgaagatgactattattttaggttaatatccaaggctggctgccaacaagattgactgtttactatgtgtgacgcccaactctaggcatactatagatttccttgtaatactgcttaaggatatcctttcttctgaatgtcaggagtactctttagaatccaccacttagaatttgtagtgctacttcaggggcttgtcgcaatttagcgtgagttcaagaaatgttaagccattactttttttccttttttagacaataactgctgtggtgtgttttacacttgtttatttttaaatcaattccctcaaaggcacttaaagaaacatgtcatttaccatgtctcctaatgacaggtcctgatgacaaaatatattagtggttattaggatagagacaagactataaatttctgggaatttttggatgccttatattgaaatagaaaatttagcaaacatttagtgcacagaagggactttcctgaagggtcattcatgttacttccccatattagagtagcatacttaatagatacttacccatacccttgtgcctgtcccatcctctgtacataagcatgcatagcatttattattattgaactaagcatatagctcaaaagattagtgtcagatgtatgatggtcttttacatagacaatatattcaaaacttttgtaggtatcccttcaaagaagaatggccaaggagagtattttgacacttaagtagcatccaacaaggctgaaggggtagagaaatgtctgaactggaaatactgttgaggtgtaatagaccagcaaaggacagagttaaagggagaggtgaggtcaaatttaattgttgaatgaatgcatgaatctatctatcagtgtcagagctttagatatgggttggactttatcagtttccaaatgttgtcttgcctttggtgctcagtgactctctaaccttgagcaagtctccatatgacaagtgatgtctcctaatcttcatttttagaactcttttaaaaagtgaacccttttgtataatgaaaagctatcaattgttgaaggagataaccatgttttacatgatcaagggtatgtaatgtttgttataactcagatggacttggaggtaatgagctagcatcacagttgcatgaacaagagggtgatggagaagaaggtagggatgtggaaaaccgtttggctattgtgcaagttccttagagttgcaatccacagttgtcccagaacgtgctggactcagagcttgtttagggcagctgttaacatcagaagagatctgatccagcaagtagggcctgttggggaaggttccaggtagcctgcttattcttaagcaggaaaattgcactgtggttccaggtcatcattccatgttgatcagaaaagccagctagcggttgaggtacagggaacagggcttagcttcttgtagaaggctagccagtctgggtagggcatcactgcccacctacattagatgggtgttgggacaggacttggcttccaacagaggactgaaatgattctgtcaagactccataatatataggctgagcatatcctttaagcgggtggagtagctcctggaatcacatgaaacgcttagagaaaggttgaggaggatctaaggcagcttgactaataccacagattcattcctgtctgtgttcagccttttcatctctccagatggcaaattgactgactggcttagcctggactgtgtgctgacttttaagtcaatgaggagcatggagccttgatggagcagtcccctaagactctgggggaggggttctccaaaggaaagcaatgggctgtttccaggagaagcagatgccgagctggaaagagcagattgtccactgcacagagtctgcattaacactcggtacagggatggtgtattaatgcaactgaaaattccatttttcctctggctactgttgtcatgatctagaaatttgagaggtattgctaaatagtttccattttaatttccatgcttttaagggtgtttgatttcttcagtgccatatttgaaaatgtggtttgtaagtctttacctttgaagcacccagtttattgtttccagagtagtggttccttcttttcatgagctctctctctctctctccccctacccgtctctgaacagctgctgtcaggctcacaatcgaacatttgaagtgactgttctgctctaacaatgcagaacatgggatttcaagcctcttttgtcactgcagtaattgcttctgcatttataattaaatgaactatctgtactaagataccactaaaaacaaagtaaatacaaacatcttaattattcagccaagaattgttttgatccagcttaagaagcttatgtgtgtgtgtgtgcgtgtgtgtgtgtgtgtgtgtgtgtgtgtgtgtgtgtgtattaagcccattgctttcctttggagaactcccccttcccccatagtcttaggggactgctccatcaagttaccatgcccctctttgacttaaaagtaagcacatggcccatgctaagccaatcacagtcaatttgccatctggagagatgaaaaggctgaacacagagaggactgaatctgtggtatcttgaactgattccattagtcaagctgccttagatcttcctcaacctttctgtaagcttttcatgtgcttccaggagctgctgcacctgcttaagaagcttacatacatacatacatgtgtatatatatatatatatatatatatatatgtgtgtgtgtgtgtgtgtgtgtgtgtgtatatatatgtatatatgtgtgtatgtatatattcttaagcttctgtatcaaaacaatatatacaaatacatatgtgtgcatatatatattcaggactttcaattattaagcctttgaaaaggatagtggttaatgctaataattccatcttagtagtacctaactttaatcacacctaagttctgcagttgtgcttgtaaagtctctgtctagtttccctgttaatattcttttattagattctttgactgttgcaagcatgactgcttgtttaatgaccccaacctaagtcaagaaacttgagcagctaatatggtccctttaatgcctaatattggaaaccattgagtgaaaggttatataattgcactctcctaaatatgtttaggaaataatataatagatattctgattccaattacagccttacttataattgcaataaagttgagtctgcaaaaaacttagtggttctataaccgtattaccaggcaacagtgattttgtatcttgttcttgtctccctcctacctaccacccctgcatttctgttgcataaccccatacagatgacaattttgttaaaaaaaaaagtactcaatattaattgaccaaattatatggcaaaatttattattttgctgtctatattgatttacactggtcacaactataaatattatccaaaataagtaaatgttaatacctacattacagtctttaagacttttagttttcccgtatcaagtattttgaaggcgagattaatctgtggggaggatagggtgacgggaactgtttgaatgacaagtattgtgctacattgctaacataatgtcatcctcacattaaccatattttatggatgaggaagctgagactcagatgataaaataatttgcccatgtagaagtgttataatctgaatttgaacatacatctgactacatagcctatttattttctcccatagtatgcctttctgatttcataataaaaataatagctagaatttttgcatatgcatgaggagccaggcactttacacatgcattatttcatgtaatccccacaaactcttgtaagagcgtaggtagctaaaggttaattatcttgtctaaagtaaccagagctcataactggtagacctaaacagtctctctcattcttaggcatgattctttaatgccctccttgattatattctgtattttaaacattattgattaccatgtaataatgagaaaaaggatgcatggtatctaaggattagggttgtttggctgtaaagagaattctattcattaagtggttaattatttgttgtatttacaatcctacaataaagtaatgggcaaaattaatttgaacaatacatgtaacccaacacatccaaaatattgtaaatttagcatgtgatcaaaataaaacattatgggtcagatttttaaaaatcctacatttctttcatgtcttgggcttttgcgtggagtagcaccaggcagtagtactatggagcatcatgcaatcatgaagaggttatatggctcatgccagctctgcctccagagtataatgtatgcatccacttcctttcatctctgtcaccagtctaacccaggactcatcatcttttacctggattatcacagtgtcctcgaaatggtctttctacttaaacctgtcagtgaattcctactgcataaagaatataaattcaggctgttattctcccaatctggccctgcttctttttgttttatgctctgtttactgttagtggccctcatgttcctggaaatgccaagctcattctcccctccagggcttttcctgctattcccccttttgggttgacaactgtcccttatcttcctttatgtgtcatcaaggtctcaactcagcatctccttgagacgtcttctctgaccattcagtgtaaaatagcagcagctatagtagcatcactagcagtgataacaacaacaatgaaaatagctcacattcattactaaactcttactacgtgccaggcattgttctcatatttactcgctgggtccttacaaccaccctttgaggtaagatactgttattagttctattatatgcataatgaaacttaagcacagagacttctgtcaattgttctacaatcacttgtttattttcttcctcattcttaccatgttctgtaattatctttttcttctctagaaaataagtccctgagaaagaggaccttatcttatttcctgctatttctataacatttttaaaatgcccaaaacatagtagattcttaagtatgttgaatgaatgaataagcaaatgaatgaacaacaggtcttattagatcatgatatttcggatgaaaaatggaatatttcagaaatgatacttctctcatatgagcaggtcagaagcctttcacttatactattgagcattttcctctgttacattgtactgtgtgcatataagcatgtgatgatgaatctgggcagatgaagaaaggaagactctgtgtcgtcattctcagcaacccagtagtcactgatcagtaggtgccaggtagttgttggcaactgattatagtcactgcttagcttttcaaatatggatgttgagttaccatcacaaagcaccatttcacttcgtgactgagttttggctgcagattaaggaaggcaactgttgctgtgaaacatctcaataaaggctcaagaagggaaattttttttactttgtttttcagaattttcctgctcttctgaacaaaactattgatttcttttctgcctgctgctcagcagatattaatttcacagaattttagagctgagagtaactgtcagattattagcctagcctggcttccccattttacaaaggaagagaataacccccagggatgaagtggtttgtgcagggtcatgtgggtaattggtagaagaacttgagctcacctcacagcccctaagtgggttaagtgatgaaacactgttcggggaagatgagcacttgctcacttcagagtcataattaggatagtgacccaccagcatcctttgttttcttgacaaataaaattattgctggaagctaaaatagtcaccagaaggatgttgcttgtatatttttatttggtaatacaaagtaatcttattaacatattcagtagttaaaagttacatgtgactattccctatactgaaattcttggtccttctgaagtttagaaatagcatttggccattttacgaccaagaatgcaaaatttggcctcttagagtctctggtttaaaatatgcatagcaaatactggataattttattattgcttgagataaaccacaattcagaaaacaaaattgcttttctgctggcagggggaataggaatcaagcagaatattacagacattatttggcataaataaggaaaagtcttttccttgctcatttcaataaaagctagaccagattcatttttctgggaactggtttgattctgaccgtttttaagaagttacagaccttggagaacacaatgttgaaagaagctaagatttcccagaagctgctatacaaatgtgctttcatacatagaaaaggatccttgctcagttccattcctcaaagtgataggtgtatgaatttgcctgccaatttgctctgtgaaacttaatttaagaagactaataatgccattagtggatgtcaaatgtctgagcaccaaggacattggggtgaatgcctgagttagtctcttggagaatcgaaaatgtgaggaaggcgcatatatctggtgttactatcatcatttactttgtgtgtctgtacttgtgggccattttgagatgtctccaacaacttggaaatttgcgaattgagtataccttctcgtttctttctaagactaacatatacaggagcaaagtcacctgcaagggggctagattggttcctaggcctacaggatttggtaatcccattggaagattaaatatcaatttgtgttcgaaggtggaaatgggtatggagatggtcaaggaaggggtaagtcatggggttaaacattatcagcactcttctcagctctgcagaagggaatagaagcattagccaacagacttgaagtatcatggcctcattgtcaagatattgcaacaaacttttaagaggttggtcctacagatgcatctacccctttagcaggattggttgcatcaggctgtacttccctaatgctatgagagtctcagttcacctaaccactggtgggtgggttactttggtcatttaacttctacacaggccaatctgggagagttgaattgattatggaacttcagttactctagttcctgtggcaattacttctcatcataaatttactaattgttgtttggacatcagtcctacaggcttgggcaacatatgtctacttgaaagagatctgtttctagtatattactaatctggttttgctcacttgttaattcatcaggctttgagggcttactatgaaccagaggtataataggtaacttaccatgtaacaagggaagcaggtgaattgtcagttacaccacaaggtagagaattaccaccccaaaacattcttcaacctctaacccagaagccgcctcccatttttatgaggctcagcctatgactgtatcattattcaccctgttagctctttaagtataatagacatttacaatatctattacatttattgtaatacaaattacatgtattgtaatctattacaatattaggtgttttaagtacattgcatacatattccttcatttactaccaactattccaggacatgaacacagaatacttctctttgacagattaggaaactgaagcctagtgaaagtaagtaactatctaaggtcatgttttattcttggctttgccatttaccaaatactgttcattcgactatacttaatacggagttcaaacccattgcatggtgggcttcagagttcagtctgaacccagagaaaatgggtggggcactgagtggatctcagaagcagtctgttgaatgtcttgaagtccatttccgttaaataggtgagtattgtatgtcctctttgcacaagattgtgctaggaaaagctgagagagataccaaagagcatgattaagatgcgtttctttctctcagtaaagttcacctttagcatgactttacagacaaagaaggcttctgaaggcctgacctaccaggaagactcagaactgttaccagatcaagaacggcactcgccttccccttgctttctgtgaggggatgacataaaagcgtcagagttttcagtagtccttaggagttcagacaggtggattaaaagctactagtaaattttaatgacttatgtgaacgaaccctctaaattattaaacagcaagggacatgggttccttccttaaaacgaggaatagaactccatgtataagaaggaataccatcttagtttgaccctctttggggcagggtggtaaaggattctcctattttgattgcctttgtcaccattctaatagctcagcttaggcattgcccaggtatgcacatgtagctctttatgtggttattatagctgatgaaggtggtgatatgcagaggaaataaaaaaatgaaatcataaaatagaattatctggtgcatattgaataactttcaattttgaatgtagcaaatgtgttttcacctttaacccagagctgtgagatcaaaattgctacctaccttcctcaaagtgttggttcattaatcaaatggaagagtccgtttctctttacatggaaagagtctggattgacaggttacttacgttaagtccagacctaagttgcccatttctgcaatgtaagatgattgcattgaagagtttaattataatggttacaaactctcacttccaaattagcaaaaatgctagtctttttcccaggtaccttcatcagaatattcctgaggatctctgaggtcaagtatgttcactgagatatttctgagaacctctgaggttgctgtgcctgtttactgctagcttgctgtcacctgctaggagtaaacagaattggatacataacagaaggtgatacctgcaatctctggccttcaaacattctgggagtgggcttcaggtgcctgatggctctccatgtcactgctgaggagacaggggagaggtgcctaccagctccactggctgagagcctcactccctgctttcagtgcagatctcccttcctcagtatcacacctggtcagggcacaacagagcgaagcgttctgcatacattcagcttcatgtacaatatctttccaaagcttttctgtaatgcctgggtaaagaaagcctatgttgtctgtgaaatcctgtgctcagagccatccagtctcttcgatggtcctacccctggcaacagtttacagtttagattttccccttcattttggtgagttttctctttaaagatcccttattatctgacctaggttgggcccctactaatccattaggattgttttaattactctgattcccacataagggatggggttaattccagtccctttagttcaaggaaaatcctttgccccacagaaattcttgaatacaagttaatatctgagggggagatgcagtatccaattgctttcagtggatagcaatatccagtgctctcccagcagcgtttgagacctcaatgtaagtaggtgtgtctggatggagtaacacccagttcctcagctaaggacatccaagggcggggccctcaaaagtcccattacataaagtagatacaacactcaaaagtccattatataaagtaaatacaacacaacctgagaacatcagctcagagtggagtgaagagctggtttttttgaggctctctctctaatccagaggcggggaacagcacactctggtcttcatgctaccacgaaggaagacctaataaaggactcaattttttttaaagattgatctccctctattcaataacccatgtgtgaaatttcaattatacaaaactagagggaaaagtatgtgtttagaacatggtgtagggaaacactgtgagcaaagctgctgattgggtctgaaactgcaaaatgggtgtgacagaatctactcggagccatgtgacctccagggtgataaggatacaatgtgcctctcaccctgtgcccctcctacttggaaagctttcagtggttggctgccaagcagagcgcagggtcctctgggacctggcctgcgtgcttcctcagcgtggtttctcgtccgccttctgtctgtgctccagcagcactgccctgtttgctctcccctgcacacatgacaccgtttctcacaccccagtccctgtgctcatgcttctcacctttgtagaacacctcagtgattttctggtttcatactataacaaaccccacaggccagcttttcacatagttgttaccagcacttggccaacagttgttttttcatcagtgggtggagcagcttttcttgcccccaaaaaacagtcaaccactcatttttcattgggtatatgtattcggcaaacattgggtacctgctgtttgttggcactggtgttgagaagatgaataacacaccctctatggccctagggagttcccattctggtagggggaacctgactcaggcagcaacaaaaccttctggtaagtgttttgctgaagagtggggaggttcagagggctgtggaaacccaaagacgttttacctaacttgaacatcatagaacacttcagaagaaaccacatgtcagcaggtcttatgggaggagttggcattggctaggcagaaaagagaagaaaaatgggttttggagatacagtactgttgtcacccctttgatttttcactagaagacacaaaaagctgtttaaaatactatctgttgatattctgttctagaacttgtatgtattttttaaagtgtttgtcaacattgcaacaaagtacccagttgaatgtatcctgttgtttcaatgattatgagatgacttgaagtgctcttgagaaatttaaagttcgtttgtgaacatgaattctaactggagaaaaaaataggtgatgatagtgagttggatcattgttgcagttctctatttaaaccttactatttatcttttcttctgtcttcatctgggaaaaaacccagaaaagtattaaatgcatatgctttaatttttgactatattttaaattaccttgttagttttacctaaaactgtaatttaaaccagtttaaaattaaggtttacttctgggcatctttttatatagtggaaggaaagaagttgaacacttacgggggaaatggaaagttgatgttatgtcttgtttttgatatggctcagtttttacatgactgttaaatgctgccctttaaatctagtagaaatgttaaatatggggatgttactttttattataaaagaaacaacagttaaggggaagcaagtagcttttaacagatttcatattctagactagttatgaaatctgtttttggtctggacaataaaacatttcttgtacaataagaagatctctttttaaggttatgagaagacagatgatgtttcagagaagacctcactggctgaccaggaggaagtaaggactattttcatcaaccagccccagctgacaaaattctgcaataaccatgtcaggtaagaactaccaaagaatgccatgagaccagccagcagagcagagctggttaggtcaaaatgaaaatgcttgcaaagagctttcagtgcagtcagttaatatttgagagctccctgttggcagtgtgaataggctgtttccccatcttctctcccatagagaaatattcataagaatctggaaatagcgaggagcagaaagaataagcacccatcctctgccgatgctgcatagatattgaataatgaaagctgcttatgtgtaaatgcctctgtcctaaacctgttaatagagcgatgcgttactggttttggttagcaagttttaacattttagaagaggtctttgcaattctgcaccaagaattccttctggttatatagtctttaagtattggtttttgatagttgtgaagtttagtatggtgtggaggaatggagggctgtgcgaattacttcactgcactgttgtgttttcattccaacaataatgtaaaaagtatctgtgtaagcactggccacttatgcggcttctgggaccacataaacaccttcaataccaataaagtgtttctccagtggcagagttaactagatttgagaagtgcccacttaatatgtacaatttcaaattctagaggaacatttctcaatttgggtaatgtggcatgtgtctgctttaatctcctttctatttgataaacaagaggaagatctgggtgtttctaagacctaagtagtgatatcttactgatgtgggcatatctggtgtgtttagtgtggatttctagccatgttcctggagtggcagtgaagaaaattcaaacagaaccccagagatctccctgaaattatccaggaaaggcatctctgtttacagtgtctggtcaaattgctcaaattgctgatttcggggttcttttggcaagattttattttctagtcacacgttgtactctgtcttatggagggctggagccctttaactccaaagttgctcttctttgtaagctacttctagtaatgttaagcagaataattggccaaataggacaaaagattatgcaaaaaaaaaaaaatctgtggtattcatgctttaccatttatttaaccttttcactctttttcatttaggttaatgaccctttgcaatattctcccaatttgaaacagccggcaaatgttccttatctaactttttatatgttagtaacagaactttgtaagtgtgggtgctaattatggagaagttttatgctacttttcatttttgttttctagcactgcaaaatacaacataatcacattccttccaagatttctctactctcagttcagaagagctgctaattcattttttctctttattgcactgctgcaggtaaagtcacgtcataaaaccttgtcaaatgttcaggtactaataaatgttaagcccgtgaccaatcccctgaggtttatgtaaatgccgagagataagctggttttggtggacatttctggctcctgctgcaagcagtgttggaatccactaccttttccagccttttgattcatttttatcagcttattttgggtgttctataaatttgatgtggcaaggactgttcattttgggtggtaaaggggatgggacgttttcttaaaatgctaattttcatagtaaaagtatcaactctgaaccttagaatgcaagaagttaaatcttgtgcttctctttgtatttaaattagttgtagtcagaaaaagttttagtttattaaaaagtagcatattgaacatatgcttaaatttgaaaaaatattttcattgaacttgaaaataaaaaatttttaaaacaccacaaaacacaaggaaaaaaatttaaaactctcattattctaccatcagagacaactactcttaaattgtgggtatatatccttctggtctttttttttttttttttcctcccaagcatcgtttattgacttcgtttacaaaaaggggatcatagaatacctattgttttgttacctgctgtattcatataacaatgtatggatattttcccagttattcattgtgtttctaaaatatcattttaatagttatattttaatgaatagatatactgtaacttatgtaaccagtcttccaatggaggttgtagtcctatatacaactgcttactgtgaaactaattaacatgcttttccagtacttattagatacgaacacattacctcactcagcattagtcggccaagatagtaaaatcagtgaggcatattttagaaggcactgagactgttttcttgaatctattataaattttctagttctcattggatttctcttttttttttttttccaaacagcaaatacctgatgtgtcaccaacaggtcgttatacaacactggttcctctcttatttattttagctgtggcagctatcaaagagataatagaagatattgtaagtattctattttttcataattgtatgtgactttgttatttatatatgctttaaatattagttttttcttaaattatttaattcttggcgtgggctgtttaaaatatccattcaacttcaaaatgtctagaatatgttcctatccctgaagttgatttttgttttctgtaatattgctgaatgtttgttacagtgttctattgcatttatagtttagcaaataaaagaaattaatttactgtaataattggcttgaggagaaaagtacatttgaacattattttcaattaaatgaaaaaccctccaaattatctaagtgatattttttggtattttctattttttaatttaaataattataaatttcattttattaaatgccttggatttcttctcaccttatttaatagttctaagtttctttttcctttatctcatttttttaaaagaaagtaatagtaaccaaattagctatttttattctgtggtaataagagaaaggggaagtctctttctcctttataaaactaactctaccaaataaattcaggccttttttctgttatatctattttaactgtcttacttgaggaaaccaatgttttgttttggtttggtttttttcctgttcttttaaactacttcatatatatatagagagagagaaggagagacttttaagttcaggggtacatgtgcagggttgttacataggtaaacgtgtgtcatggggttttattgtacagattatttcatcacccaggcattaaaccgagcatctattagttacttttagttatttttcctgatcctctccctcctcccaccctccaccctccaatgcgcctcagtatgtggtgttcccctctgtgtccgtgtgttctcatcatttactcccatttacaagtgagaacacacggtatttggttttctgttcctgtgttagtttgctaaggataatggcctccatccagctccattcatgtccctgcaaaggacatgatctcgttcttttttatggctgcatagtattccgtggtgtatatgtaccgcgttttgtttatccagtctatcattgatgggcatttaggttgatttcatgtctttgctattgtgaatagggctgaaatgaacatacatatgcatatgtctttataatagaatgatttatattcctttgggtatatacccagtaatgggattgctgggtcaagtggtatttgtctttaggtctttgaggaatcaccacactgtcttccacaatggtcaaaactaatttacactcccaccaacagtgtataaatgttcctttttctctacaaccttgccagcatctgttattttttaactttttaataaatgccattgtgactggtataagatggcatctcattgtggttttggtttgcatttctctaataattggtgatgttgagctttttttcaacgtttgctggccgcatgtatgtcttcctttgagaagtgtccattcatgtcctttgcccacctttttttttttttttgagacagagtttcgctcttatcacccaggctggagtgcagtggtgcgatctcggctcactgcaacctccacctcccaggttcaagcgattctcctgcctcagccttctgagtagctggaattacaggcatgcgccaccatgcccagctaattttgtattattagtactgacagggtttcttcatgttggtcaggctggtctcgaactcccgacctcaggcaatccacctgccacgtcctcccaaagtgctgggattacaggcgtgagccactgcacccagcccttttcccactttttaatggggttgttttcttcttgtaaatttaagttccttgtagatgccggatattagacctttgtcagatgcatagtttgcaagtgttttcccccattctgtaagttgtctgtttactctgttgtttttttttcttttttgctgtgcaaaagctctttaattagatccaatttgtcaatttttgcttttgttgcaattgcttctggcatctttgtcatgaaatctttgcccatgcctatgtcctgaatagtagtgcctaggttttcttccagggtttttatagtttggggttttatatttaagtctttttttgtgtttgttttttttgtttttgagatggattatcactctgttgcccaggctggagtgcagtggcgcaatcttggctcactgcaacctctgcctcctgggttcaagcgattctcccacctcagcctcccgagtagctgggattacaggctcccaccaccattcccggctaattttttttttttttttcctagtagagacagggttttgccatgttggccaggctggtcttgaacttctgacctcaggtgatccacccaccttggcctcccaaaatgctgggattacaggcgtgagccaccatgcccagccttcatttaagtctttaatccatcttgagatgagttttgtatatgatgtagtttcagtcttctacatatggctaaccagttattccagcattatttatcgaatagggactcctttcttcattgcttgtttttgtcagctttgtcgaagatcagatggttgtaggtgtgcagtcttatttctgggttctctattctgttccattggtctatgtgtgttctcctactagtaccatgttattgtggttactgtagccctgtagtgtagtttgaagttgggtagcataattgatacctccagctttgttctttttgcttagaattgccttggctatttgggctgtctttttggttccatatgaatttttaaatagttaaattttaaactattcattgacattctgtaaagaatggtagtttaatgggaatagcattgaatctgtaaattgctttgagctgtatggctatttttacaatattgattcttctatccagcagcatggaatgttttccatttgttttgtcatctctgatttcattgagcagtggtttgtagttttccttgtagagatctttcacctccctagttagctgtattcctaggtattttattctaaaatagttgtttgccagtctgagaggacaatctgttaatccttaggaaagtaagatggtaaagccaggaaatggtgagaaatttagaacgctccaatttaaagttatacaaacattaacactttttctatagaggatcaaattgggatctcattaagatggcatttgccatgttaggaatgggtcaattgaacatttagatcatcagtttcaaaatcatccaagtatttaagagtagaaacagatgttgtgcatgtgtataaaacagcatagtcttcttgattggaaatgacatacttgatggagacactagctgagaagtgtaagagactcctacctgcattgctccacatagacttgccaacctttaaattgtggtaggacttggcagtccacagggattggtctttactacacttttgtcactttctttgccttttggacttcccttttctttgtttagcctaattatcattgagtacctttaatttactaggcatcatgctagtgtttcacaaatgtttttctcgtttaattttttcaataacattgaaagttggatgttaacccaattttaaaggtaaggaagctgaggcttagagaggtcatgtaacttgtctaagaaagtgatagaatcagaattccgtcctatccagtgctcttggctctgcatgattgtgaagagtcaccaacatttattgtgcttctaggttgtacttactctatgtcctttacatttactaaatcttataacaacccttgaagatgttattgatcttatccctattttacagataagaggaggcaggaggggtacggtaacttgtccaaagtcacactggggctgtcagaatccaaacaaggcattttggctccagactcctgccttataatcactactcaaaactgccttccctgtcttgttttgctttgttttgttccctggcaaagctataatctctctagctatggtttctagtactccatctttgaaagtacgtggcaaataaaattgtatccaagaagtttttttttaacagaactctttttggcataatataataatcaggtactattagaaagttgctaatcatgcagtcctaaagaatgtaataatagtattgtgagataatagtatcatatgaagtagttttccaatgaaatcactgttaagaaattgactagaaattgtaagagtagtttagcaagaagtttatgccaaactgtaaagtgatagaaagtttgaaagaatactctctaaaatgggggacaaatcaaataacaatttagatagttggacaaagagctgtctttatcagtgagaataatgaatacatcttttcattcatccgttcagcaagaacatttgaagaactcttgagctgccaggcattcattaggatatgtatgaggatgtgttaaacttttgctgtgctggtaatcatgtctcatatgtcagtggcttaatatataagtttatttttcacttactcaaagacacgtgatggtgggcatcagggattcagcctgaatcaagattctgctttgtggaatataggtggttattgtagcaagggtggggagaggggatggaatctcagttcttctatgttttggcccagaaatggagcacgcatctctttatagctcaatattagaactagtggcatggcaaagagaaggtgttatctcagggtccatggaagtggagagctggatattggtgaagactggtcatggctgccactaatacatcagtgaataaagcagagattacaatctagtaaactttcctatattctattagataatgtttttaaatctctctatatatatagatttaaaattttaaaatatatatatatatatgtgtagatagatagattaaaatatagtaagaattgcctgcaggtaaggtactgaagacttatccacccccagtgcattttaactcttgatgctttagataacttaacatactatgattttctatttttatgtgttaataacaaataacacacatacttggaaatactctaaaattgatggagaactctcttctaaaaagctgtattatgctaaatgctagttcctgtgataaagatcaaatttgttaaattgatatttaccactaaaaatgttccctctttgctataaacttgttaatttaaatactaggagactccattcgttataaaacagttattcaaagcctacaatgcgtaggaaccaaatactgagactatgttagtgagtaaaactagccgtgatggagcttatatccaatagaagagatcgacactaatcaagtaatcatactggtgagaatggcttgaaccctggaggcagaggttgcaatgagccgagatcccactacggcactccagcctggacgacagaatgagactccatctcaaaaaaaaaacaaaaaaatcacactaggctattaatgagaattaaatgatggacgtgaagtccttagaatagtgcctggtatatagtaagtgatgaataaatgttaactgtattatcatctagagatccttttggcttaacagtagaaaatggattgcaaggagaacagagcatttgtgcagacaagaatattctagttgttagtgtaaaaaaaatgaagatatattagactcagcaggtatggtagacatggtgaaaagtaagaaaatgaatttagtacatttttaagagtaaaactgacaagacttaccactatctaacatggctacataccctattctatccacaaccactggaatgtaagctccatgcaaggaaggggttttgtcacttgttactgtagtctcagcaacagtaacagggcctggcacatagtcagtgtttagtaaatatttattgagtgaaagaatggcttggataggaatgagagggagacaaaggtattagaatgaatttcctggtttgggtaaatggatggcatgtgtttccatgtctgagacaagtaccaggtcttggagattaaggtccctggttgccttgtgaacagtttgagatgcctttgagattgccggagagatgttaaagaggcaaccagatataatcgtggagctcagatgagagttttgactggtatatatttatgtactggttataattgaaactgcaggtatgaaagagttgtaagaagagaatatggagttagaagtgaggagggccagggagtaagccttgagcaataccattgctgaatagcaagtaggcagaggagacaagggtcaaggtgcagatggcaaacctggcaatgatgtgataagaaatacctagggagggaagagtttccagaaggagggagtggtcagcattgcatactatgtatcctgaagttcataacactgtttatacaatacagtttattcgtgtgctgtcaatctaatactgatgatattaaataattcattagccctcagtgatagtaaatgaatttggattatgacacagttgaggtatttgaactcagagaatagcttaattttttatgaactattagttttagaaggaataatcttatcaagacacaaaagttagatgctttctttttgtaggcatgggattaaaatctgcctattgagatagattcttaatatattcaacacacttgtttcatgacaagtaacctaattctgtgatgggaagatagaggaaagagatgctcttgtgcaagagttcgctgtagatggaaagtgatgtttaagatcgccttgggtttcactaagattaaatttcctctttgaagtggaatgtttcattaattagcttttatttatctcctttagttggaaatctaaccattgtctcgtattttggaaacatttgtgcctcctttgaatatctaaatttaccttggactgttatttttgatgaaaatttgttttggatcactttctaattttcttctaatctctactaacaagcaaaaagaatattttcaaagttctgtaactacaaaatctctactgatgctacaaatttaacagaactttaaacatttaagaatcttttttggcaaactgtgcttgcttttggaagcaataatatgcctattgaaagtctacattaatacacttttattagtgagtattttatactgaaaaggagttctgattgtgttcctgcatgtctgtgtgggaagaatcattctcaacaattctttcgcagaggcattttgaatgttttgtttgcattttgtgcagttcagtagctgattgtttccacagactgagtgtatgctgccagctcttatctattcctcttgggtgttgccatgtcctggagtgctaatccacacttctagatttttctcttgcagtgttttcatatgcacactgtgattctgaaaactgtattttttctcaaatggaaaacttaggaactcatttgttttacatttgttccaacccatattatagtcaggtacgcacaactatattcaacttcaggctttgtatgatacaatctttgagcgaacagagttagttacactcaccgctcttctgcagtgttaatggagtctgatgagttacactcgatgctgtaaatttagatggaagccatggaaaacctctaggtgaaccggagagaaaatagctttcctgggcactcagattctcacctttcctctgaccttctgtttcttcttcttacccactgctataaaaccttggcttatgcaactcttcaaacctacctagacttagactaactcacttgcttattgtgtaattttgtaggtgctcttgggaggaaggaagatatgataagattatgtaattcaatggctttcggttgcaagtggtgggaggagggaatgctggggagcattgaacaggggagactgtatgccagtggtagacatcgttggttcaagtcattggccgacatcagcatatcattaaattatagaggatgtgctcagcttaattcggtaacaaatttcgtaagctgaaaatatttcaatactattattaaacagtagttattatagataattctctcaggcaatctcctttttgaagtgagttattaaagcaaaatactaaatcaacctttcatacttttctagtacattaaaattttaatcctacctatgtgccgaggtaagatccttgtgaggaccacaaacttatgctctcagaagaggagcactctatggagatactgggaattgttctttcagttttaaaattcctaggtgtgctctaattcttcccatcaccactcctccatcaatgtatactttaacattgacatgaatgagaaatgataaaaaccttgagaaacataagctaaatcttttttggtatgagtgctctcttgttttagtaatcttattcacattttcacagttgttctttttgcttttaaactttagaaacgacataaagctgataatgcagtgaacaagaaacaaacgcaaggtaggaattttacatgcttttttctcatatttgtcaaacctacttgtagtatatacaaacacttcaattacatataattcaattgcaaatagtgtgcatctcaagtttttgttttggggtagattgatttttgctttgtggcatttgttaggatgacacttaaactcactttaaagtgatttatagtgataatacttttgaaagccaacattttaaatatatttaagtgcttcatagcaatagtctctcaaatacagtccataaagtctgcagttgttttgacagtgttaaatattataaatttattttgtttgtaatctacagatgttattctagaaaagatgtatagaaaataatcacatgtgatgtcacttgagtgaaaagcattttggaaacactgagttatacatgcagatgacagacactccagaaataaaacaaatacaacccggcctgcttctgtacagtgcatggcattttggcacagctctttttggatggggctcattttgatacagccaaaagcaaaatgatcttcaatacaagcaaattcgccatcatgctctaagattttttttttttaatgcccaggaatgtgagaaacagacatcttagctcatctctgaatgaatttgccccatctgagaatctcatctctgaagttctctgatgtggtgaggataagtgatgtctgccaacattatctggtatttaggaagactatttttatactgctgatatttctatggagtcctgtcaaaattccctgcttctttttcaccacctcccacaataggcattatatgccaatttttaatacatttaaggatgatatatttactaattaataaatttgcaaaatatttactgagagtattttattatggaacatataagaaagtataagacgggaatttcaacttacaacttataaagagcttataacatatttgttgaaataggtacatgtaaaaacatgtaaaagtacaaagagatgatctgtgtggaagatgaaggatttggactacatgatctcaattatcttcggatttttgtggcaaatcatagtttctatgtcaagtgctataaaaattggtaaggagagaaaactgtggtgtatcttgagctagaccttgaattttaggaggacattggatgaacagagaggaatggagaagatatttttatgtgtgggttgagtgggaaaggaggaagaggggtttttcaggaaaataagactgtaggactcctttgctgaaccattattagactgccaggcgcagaaaggagattcacatcagagggaaacaaaatcatgatttaaaaggtaggctgaggttgaattgtatagggtcttgaaggctaagccaaggggattccaatatttcttgtggatattgagtcgctgttgaaggtttatgagccaaaacgagacaggccgaacatgtgggttaaagatggaaggcagaatgaacaggagtaagggactgttagaagcctgggacagagctactccaggagtttagttgtgaagggacaaacacaggaattgaaagggaaaaaatccagacgtttcaagcctggtatttttggcaatatgcagtttttgcatttgttgccgtattgctcagaatattcagtaacagcttttgaaacagaagtacataaatgcttttccaacccataatgtatcttgtagcagagggctcctatgttcagtgactggcaattattgattttcaagccttggctcaagaagttgacatagtacagtagaggtgtggtcaccatagctatgatgattttgggctaccacacaggtgctccacccttctgggtacgtacttacctccaaaaaaaaaattccttgcctaccattcagataaaattttatttcttgactatccatcttggttcatgagtccccttcatagataacaggattggccctatggctaaatatgagaataggcaagtgagaggaaaagcttctataataaatatatataaaactcaattcaaaaatgaaatattagggcttagctataaaagccatttcagtcaacagaatacacttcatatctgtaggtttctcatcctaagattcaaccaattgaagatcaaaaatagaaggaaaaaaaaaaaatgaggccaggcggggcggctcatgcctgtaattccagccctttgggaggctgaggcggatggatcgccagaggtcaggagttcaagcccagcctgaccaacatggcaaaaccccatctctactaaaaatacaaaaattagttgggcgtggtggcaggcgcctgtaatcccagctattcgggaggctgaggtaggagaatcgctcaaacccaggaggcggaggttgcagtgagccaagaccgcgccactgcactccagcctgggtgacagagagagactctatcttaaaaaaaagaaaaacaatgcaacaataaaaaaaaatacaagtttaaaaatatagtataacaactatttacatagctatttacatatttactatttaaattgtattaggtcttataagtaatgtagagatgatttaaagtatatgaaaggacatgcataggttatatgcaaatactgcaccagtttatttaagggacttgagcatccatggatttgtatccatgggaggtcctggaactaatccctcatggatattgaggggggactgtactttctttcagatcttataagtcccatatccaagaaattatggcttttatgttggtagttgaatttgtttcctaagagaatagtatatttttgttttcccctttgctgcctttgagtattggtcttcttggtttggcagttgataggagataacaaaaatgttcgagtaggatactgtttgctgtcagataattcagattgcttaacatgaaagccatctgttattaggccagaatgaaattcaatttgcttttctgaattgaggcagaagtgggtgtataggagtggggagggaggagtatttttgacaggtaattaatttttgatggacatctgaagcatccaactcattttcattttgtcagtgtttgtcaagtccacataatatgtaagagacatttttttctcaatcaaatgttaacccttttatattcacagaggaatgaatattttctctccttatgtgaggcatcagagggtaacactctcattccttagcaacttcagaaatataaacttgtctttttatttccaacattttcaaccgtttaactgaaaactggtgcttattggatgccctgttttcactgataagttaactcaatcagggatcgaattatggagctgagacctaactcagaacctaaaagttgtcaacaccacttctggaaacaagccttgccccagagatatataagctggtttggttgatgattcagtgacctgatgaatataaaattgtgtactgttttccaacaacctagctgcagagagaagacagagtaggttgacgctcagaagtccagggatgtgagtgagtcttgatgagttttatggtccactccacccagagcactgtggctgcttctctttgctccagtgtttttgttgtgtgatggtttgtgcatactagataggaacactacagagggaaggtccaactcttactcagctttgtgttcccaatagctcccagaccaggatcctgtcttagtaggtgctctctgtgtgcatgttaaatgaacgagtaaatgaaccactctccagataaatacttcagtatacataataaaggaagaagaaagactggaaatgaaaagaagccttcctgaaaattcattatctggagtgcgaataagatgaaaagcagtatcttcataacactgtgtcccagactttcacagtcactgataaaatccaaatatggcagaagttcttgccactttatcttctctgtcaaagtcattatattatcatttaacccttgcttcaccttctgtcaatacaatagtttgtctactgatccctttcattactcaaagcactgccctgttcagaatgcgctcattttccttgtatctaaccttactttcatttcctctgatctcttccctcagtatttgaactcacattttggcacagcctcctccatgtgtctacacacacaagaggccatctctcattgttttctctgagatgagttgttctgccaaatatatctttgcagaaatttataaattacaaatttataattgttattctaatatgcacattgaagccagtccccatatgaatttattgtggtgattgagctagtttttattttaactggtaaaaatatgctgtcgttttttatgaaatgccatgatggctagcttgtcaatatttcaagtggaatgacaacttcatctaaaatcacaacatgggggcctgggaaaggatggatggagttcaggtgcaaactaaggtatttgggaaaatttgtaaatgcttcctaatgagtaaatttgctttttaaagccccaggtgtattccctggacgatggtctgtatacattctgcatatgagaatgtgtgggagatagagctgcgatccttagcagcccattgatcaactggtttgatgctatagttaaatgaaggctaaattgtttaatatcgtaccctattttattatgatactaagcattagaataagtaataaagcagttttctgattatttagaaagggtcacatgaaattcttttaaactagacacatagctaaaaataataaatcgactcatattcaccttatcttccttccccagagctacatcaatcagccttttctgaatggagttgagtgagtgacagctgatagccactaacaagactacttccctgcagggcgcatagttgcttatctcccactggaaaccatttcagctttaaagtcctttgtgaaaaaggtgttgagttgatgtggattgaatgtgttgcgggttgttaagcatgaaatgacctactaacaacaaggcggagttcatctggttcaattcatttcagtgctgttcaaagagatgtattatgctaagggacttaaaatagcaacacctttcttgcctgctgaaaaagagagtgttgctccctttttgtctctctggaggtacccccacatctgctctgttcggtagacctgaacatatattctgccacgtgtatgttggcttacctataaatggtttttagaaagtagtgtttcagtgatcctagggacttaaaattaagcatatttatggcctaagtaatttcagacatctataagctttataatattttcagattgtcacaaagatctgagtattatgcaaatactaaaatctaaccattgaactggttagatgtcttcagcagtagctctggatggagaggagatatttgtggggaaagacagctccaggttgtctttcacttttttttttttttttgcacacaaaggagcaaaacccattgaggaaatttgggaagatggttaaagtgagaggactgattttatggctggctttatgactttgctctgtgctttattcgtgtatgtgcatactccactcacattgtcttttatttttaaatttaaaccaggtagtctgctttcatgggaatttttctctctcctgtttttgccaaacccaaataagttatattaacatattttctgggaaaaatgggtgtgattcaaagttagaacatttgttattttacttcagaaagtctttattgaacatctttcttgtgtaggaccctgtgtagaaaatgcaaagagaaatcatacttgtcctacaggaaattataatcttgtcgggaagataagatgcagactgatataattcaaggtaaaaaaaaaaaaaaaattaagggccaaatgagagatgtagggattccaaaatgccatttgaggggttcatgaagtaagagtggaactttggtaagcagatatcagggtagtaactgtgagtgatgcagggtgaaaggactaatatgagcgttactgtggaagtgggaagacatgagatgtactctggaaatagcaaatagtctgttttggccagggcatagaatccatgtcatgaaacaatgagggacagggacagggaggcaagttagggtcatttttcggagtcttttgaaaaccagggtgaggaacttggatggaattctgaaaagtatggataggcttccacttgtgcttttgaaagaatttgacagctgtatggagaggtggcaaggagaggcacagagagattgattttcttattaaggagggggacaggttgtgtcaagtagaagacaaaggaaagcacacagtggatagattcaactggacctggcaatggagagaaacccagtcaaataccaagtgctgccaaatcaaaagaccaggactgagacacccactaaatccagcatttaaaagaagtagccgttgttcatttttcttaactagagagtagtcgtggagctctgaaaactgaagccagatcgcaaggagttgtggaatgactgatgggtgaggcagtggagggagatttttctttcaaggaatttctcaattaagcagaggaaaaagtgagggactcatgactgtgagcaggagaaagggaaagcatttcgagaatagggtattgctggtctttgtgctccgatcacatcgtgccacttatattgatgtttaataagccattggttctcaaatttggcatcagaatcccctggagcatttgttaaaacacagattgctgggactcacacctagagtttctgtaggcctggagtggggccccagagtttcagttttaacctctcagtgacactgctggtgagggggtcgtgcttttaggacaactcatttaaaggttgtataaatgagttgatagaagtagtatcaaccaatttgacatcaatatatgtattattatgtgtattacatgattgaaagaggaatccaggaagtttccattgtcttttgtgtcagtggacactaatggttcagccaagcccctggtggtttaatgtaacctttataggcaagcttatacaagagactcttcctgtgccatgtcagtttgtgccacactgaggcttttgccttaaagttgtctttggaagtaagagtctatatagtgaataaaataatattttaatgttggcatattggctttccttctttgccccagtcaaagccatagtctcagctatactacagtccttgatgacctaaaattcctcttaaatgctgactcagaggaattggagcacactacattttctgtggttttactattcctctatgacaacagtagtgtcattgtctttttggatgacttgcctcttgttacccacttaagaaatgataggctgggtgcggtggctgacgcctgtaatcccagcactttgggaggccaaggcaggcagatcacaaggtcaggagttcaagaccagcctgaccaacatggcgaaaccccatctctactaaaaatacaaaaattagccaggtgtggtggcacgcacctgtaatcccagctactcaggaggctgaggcaggagaattgcttgaacctgagaggtggaggttacagtgagccgagatcgtgccactgcactccaacctgggtgacaaagcgagactctgtctccaaaaaaaaaaaaatgatattattgcccggggagggcaccccggtgacactttcagcagtggccccagtggtagaccattctgattggggtggggtgggtgggaggcgtgcttctctcagagaagctgatgttagagtgtaagtcagcacctgcacctgtgcattatttgattgggtcctgagaaactggccacttcctccagggcctttgaggaatcccgaatgttctctaacagaatgttttcattcaaaaaagaaacctattacaacaaagctgttaccttgtatcctgctgaataaaaacaagttacatttgaggtaattgtttagtctgagctctcccatggcaggactgtcagactaattaagctgttagaaaactataacaggtgtgtttggttggaactggtagaggagttttgcatttaaaacaatgagctgtcaaagcaccataccactagccattctgacaatcctgtcgtaacttattcctactccccttcaccaggcttctttaatcatctcctctaggctcttaacgctttccatatattggaggaatgtcatcttcctaaatgaaggtagggaggaacacagtcacctccttgttgaaatctaatccagttacattgtgactggtttcttgaacacattctaaatgtacaaaattacattggccttggctgtgtaatgtgaggtttacctaattctctactgaaatgaatacattaaaaaaaaaaaaaaacctgtagaatcagaatagcatctctgttacttttggctcaacaaccctaaatgctcatcacaggctgggcattgtttcttgctttctctaaacttaggtttgtgccgggtcagaggaggttgatgatttaaaaatacctagattgctaattcagtcaccagcataatacatgtggtggtgtttattttcattgttctaaggactgggtgtttaagaaccagttctaaaagataacaatgaattataggattgactagtttccttggccagtgttcaagtcttgatttgtatggaaacttttttttatgttgtgagctgatttttaactttatcagagtatactcatctatattccaagaagacactagcctcaagtttgtgtatttcctttcttcatttctgtattctggttttgtatttcaagaacacagtaaatgggggatggggtagaagtacgtcctcatttctagggagcctaccagcactgcagatgcagcaggcccatgcagcaagtgttgaacagcaaggttctgtaatattttcaaagaagcgttactctatttagttaggattccaacccagtgtagggatgtaaaggtaatttatactttcattaatccagaccactacagccttcagaataaatatcaaatactcatcagactgacaaaattcaaggaatggataagtttgtgcttgtctcagtttatagtcagtggaaatttatacattgctggtaaaagtatggagtgctgtagattcttaggtatctggttgtatctgataaaattacaaactcaaatgccccggagtcagcaatgttctctggggcattctctcttacagggtacaatcatgtgaatatatttcattgctgtggtagtagaaaaaaatagaagtcagaatttgcaccagggggagaatagttgaatgctttatgatgcagctgttgtggaaaattgagttgtctcacacagggcaaggacagctctgtgcctatctctaggacacctggaagtgtgatgctgaacactgcctaagacaaggatgagacggactagctggtgatttataatgtgctgtttaaggtttgaaactcccttgtagccacccaagactagcttctctactcagtttaagcatatatagagattgatggcttaactagttttactggctacacagtttgccttggctagtcaactagagggtagaaaagacgccactggaaacttttgcctgggctttcctgaaattcagatttcacatacataccatggagcttcaacacccgtgttgagggtgaaagagaagggatcctggggagccatgcctgtcagtctctcaggcctctgatgcttttctggtctttcattttcctgctgtaccatatcctttgccttgagtaaagtcttctgtgaatacatcctgtgaagtcttgtgtgtccacctaattatccaacccgttgtaattgacacatctgtgccatggagtattttccaaaaatgagttaaatatctctgctattcattaaagtatttatggcatgttgagtggaaaaccaagtggcagagaaattttaaaagggaaagaaaaaacaagaatgtccatgtttgtctagagaaaggtgtgcgaggattcatcagttagtactccttactgtgagaaactggccttgagaagaggaatgtcagcttttaccttgtatacatacctgtcttgctggaaacatgtattgattttgtcatttggtagaaaacattgaatatgtatttaaaagtttcttagatgtgtacatttgggcagtatgccacatttttctaagtatttctccaataatgaattgagagagaacatttgggtggagaggagaatgcactgtttggctggagacaaagattcgcaaaaggtcggttggagaaaggaggtaaataagtttgaatgtggagagaaaactgatcagagcaaggttgagggaaaatgagcacgtacagaagatggaggcgtcaagcagatttgaaggaggacggcagaagtgcagcagatttggaggcggttttccatgtaagtgccactggcttccactatccgttattgagtgaagactctctggcataatctgttggatctgagaagcctgttgtgacacttcccatgtgttaaatggcacccaacaaagtggatcagggctattttttacatgtgaactaacaaacatctgtaaagtcacagcatgttgaggagggctagattaaattacagagctggaaggagtggccctgagctgataccagagaacagtttgtgttagtgcctctgagggttacataaccatttctaactgcttgcactgaaaattggtttagtcacttataaaactgagatgtctattttaagcaaatgttaaaatagttcattggcatctttttctgtagctattttttaattcagttatagttcacataccatataactcaccatgttgaaggatacagttcaggggtgtttagtgcattcacaaggttatgcaccgatcaccacaaccttaattctagaacattttcattaatccaaaaagaaaccctatacatgtaaacagtcagtctttctttcttccttgaatcccttgcaatcactaacctaccttttgtctccatggatttgtctgttcttggcatcttatgtacatgggatcatacaatacgtggccctttgtgtctgggttctttcacttagcatatctccaagattcattcatgtcattgtatccacacttaaattatttttatggcagaataacattccatttaatggctataccacattttgttatccattcatcagttgatagacatgtgggttgtttctaccctttggctattatgaataatgtttcagtgaacattcatatacaagttttgtgtgaacatatgttttccgtttgcttgggtatacacctagtagtagaatttctgggtctgtggtaactgtgcttaactttttgagaaactgccaaagtattttcctatacaactatttattaaatgtcatgtttatgttatttttaacatgagccctactaggtagtggagttgtatcttcagtaaatctataactgttgcaatggttttatatgatcctatgacagataagaatattagtggatccagcattccacccagttagtacttactgagcaccagtgtgtgctgtgtgataacactggaatggtaacagtgagtataatagggaaggtttctcttgtcatggatcttataatctgggggaagagacagcccttaaataatcctgtttaattaagtatacagtaaaactgtgatgctgtgataagtgttctaaaggaaaagtgcacggagctcatttagatttgggggtgaggaggaaggactgggtgtcaacacaatgtcccctgagaaagtgctgttaaagctgagatctacaaggtgtgtgtacaagttaactaggtgaggatggagggaaagagaattctaggcatggaaacatgtgcaaaggatttgagacagcagagagcatggtgcgctcactacagagggcataaggagggtgtgttgggagtgacaagaagtgatgacaggaaagaggcaagagctgcttcataaaaggccttgtagatgttttgatttattttttgagcctagggaagccaactgaagagttctgagcaaggggtgacccaagtttgtgtgtatggactgatacataataatatgtaattataacatttatgtaaaatcatcatagataatccttatagctacactgtagaaactgaatttgaaagagattaagaatgaatgcaggaaactagcctgaggctaatacagacatccagttgggagggggtggttccttgaactaggggtgctgatattggtgatggtggagaagatttttaaaatattggcagattttgagatgctaaaggcataaaatcaacaggaagtttttagtagtaaaaattattccagagtttcaaaggcatttttctgtaagagttttaaaatgggataaacagggaggcatatgagcataataaaactgccaaaaaatcataatgcagcattgttcacaaagagaaattaagttgcatcaaaagcattgctacagaaacaacaaaataaaagttaaaaaaaccatacccaaactaataagtgaagtaacaaaattacaggatgacaaggtcattcattgtacaaaaatttaatgcatttctaaatattgccaatgactggaatatagaataaaaaataaccctcgtgaggttaagaaaaaacataaaatatcaagaattaaatctagtgaaagacccattcacagaaaactacaaaacatatccaagaaaaattaagatgtaaataagtacagaaagatagcttgtccgtgaattggaagacttgagacccaaatcaaattccaggaagatagtgtgttctctggagcttattcatcctgtctaatctgaagtcttaatcttcatgtcaaatatcttgattttagaaatattggacacttatagtttttttttaaaaaaaactaagtattactattgggataattactaatatgagataggatccgaaggaaataagtggcaatacagagctctagacactattgaccagtttttcctaaattaatgcaaacttatagcccactcactctgtcagttgatcttgggtgtagttgatttgaacaggactttaccatctctctttgttaccatctctcttattatattgtagccactgggttacataattaaaggggagctctcatttatttatttatttatttattttaattttattttattttatttttgagacggagtcttgctctgtcacccaggctagagtgcagtggcgtcatcttggctcactgcaacctccccctcgcggggtcaagccattctcctgtctcagcctcccaagtagctgggactacgggtgtgcgccaccatgcctggctaatttttttggtgtttttttagtagagacagggtttcaccatgttggccaggctggtctcgaacgcctgacctcaggtgatccgctcacctcggcctcccaaagtgctgggattacaagcgtgagctactgctcccagccctcatttattctttatgctttgttacaacttattttgaggaacatactgttggactctggcagagacagcacctcttgcttttctaccggaggctgttttgactccgggtcagaaacaccaaacccctactgctccatgagcaacatcgagcaggggatttactcctgggatcagtttgggtgagctctgcaggcattagagtcttgtgtttcaggatccagtgatcaatttaaggtgcctgtgctttagatccttggtccgtaactgtttaagcactgtaaaaattggtactttaacttctgcggttaagatattgtgctggaaatactttatttgagctctctctagcttggaatgattatttttttaaattaatgaagttgattcaccaaaatgcactgtgaggtattcattaatttgttttataagcatctgaatgtcccatataccaaaagtgctgcaagtacaagtaataaaaaaaaaatggctaagacataatgtatgtgttcagggaatttagaaacacagataatattttaatttaaataatttatattgtgaaacactgagttcaaaacatttttgtttttaattaatattaaatttgctgtttaacattttggggattattattgtgatcgctttagagggttcaggcttcatctatcccaacatcaaaagaaactgaatctgtttttgtacctataaattatgcattttgcaaatacttactgagtagctactgtgtgccaggtactgtgctgtttccagggaatataatattaaaacaaatattaaatgcttttccctcatggaatttacatctggataatttgttgatgggccttgacatatttctctccctaagtactaagtgctgtgccggctacctcacatactctcttatcctgttttatttttatttttatttttatttttattttttggtgtttattagcatactcagtgttatagcacagacaacatcacaggaaaaaaaaattatactggataaccctactgatgtgaagcagtagcgaaaccctaagaaatacctaccccccatcataatttaatagtagcctcttcttctgccttttttttttcttttcagaaaaccaaatatagaaaatttggatttttagggccaggcgcggtggctcacgcctgtaatccaagcactttgggaggctgaggcaggcagatcacttgaggtcaggagttcgataccagcctggccaacatgatgaaatgctgtctctactaaaaatacaaaaattagccacacatggtggtgcatgcctgtagtcccagctacctggaagaccgaggcaggagaatggcttgaacctgggaggcggaggttgcagtgagccaagattgtgccattgcactccagcctaggtgacagagtgagactccatctcaaaaaaaaaaaaaaaaaaaagaaaatttgggttgtttttgctttttgtcgctgtttgtttttttgcattaatataaacctaaaggtacaaattctttctctgttggctttatgtgttaaatttttactaaactattagaaatctattattctgtgcttgtgatttttctttttaaacattgctactcttgtagcatctgaaatgtttttaagcttgtcgcttcctttttcacatcatttttgtggctttctcctccagctgagccccatagttcctctatgtgctaaagaaagcccttggtaacaccaatcagatgctctctgttagtgatgttgtgggagctaaaatatacattggttgtttctaatttttgtgtaagtttacatattcttgctatcataattagaattttaacctataaaaattgctactagttattttgactgaagctattcgtttaaaattattatttcatcagaaatggccttttcatagtaaaacatgttgtttaaaatgtcaccttttctctttccagttttgagaaatggtgcttgggaaattgtccactgggaaaaggtatgcactgatttttattttgttccaggagaagaaatacatagcggtgtactctagtatatataattttttgtataatatgagcaaatgtgaagaattttactaatataaaagctatttagtaatataaacatgcatggcatcttcagtcacattcatttaatatttctgctgtattatagaaagacttattttgaaaaatatctagaactttttgtttttttcatagtatattttgagtactgttatcatagattttatttaaccatgaactgttttgtgttgtaattttttgctttactcatctactgtccaagtaaaaataagaattttgagttctgatgttttacttctgcatattttacttccaattcatatagtgagactaattacatttgcttaccactaattcctttaaaacaaaaatcttacaaattaaacattgtcttctaatgaaatcagttctttaacatcaaagattaatttgtttataggacctctaacatggcagttagtaggttaagtcataatttaacaaatgttattcaggtgtttattcttttcagccttcactttcaaaaggtaagcaattattattagttctcccttagttctggaagaaggtttaaaatctagtcatccacaaatgaatagctttggtaacttggtaaaagactttttggagtctgagccacccttcttagggcactttatttcctgggattgccaggacattagaggtgtatctcacaggacagtattttgctaggacaatcgaagtgtaaccaacagtttatttgcactccagtacttcccagctagttgaagtccatgcccttgattctaccttgtcatggtcatcttgtatttctgcaggggatatcttgtaccccccaattaaaaattaattaaatttctgttgattttcaatcagtggctagaatagagactgacatctcctctttcatatagttgaaaatttacccctattttttctttggtttttgacatgagagcaacaaatgggaaaataccttggttgtgttttatttatttctgtgataggaatctctttttcagaagaacaaaataaaaatgctaaaagcaatttcaaaataagtttcttttctactcttttctggcacctatggaattaaacattttagaaagaagacaggtaggatataatcaagtatgataagatgaattttattacaaatattattttacctagggttgtcagtgtagttaacataaatatgcatgctaataaataacctaggctgcttgctcagaaaataaacagaaagtcaggagataataatgtactacttcactctaaacctttaaaatgtcttattttcctaataaacaatcattatttcaagattgtgctaacctacctggattattgtaattcttacttttcctatttttgacagacaaatcaccagccaggattacccataataatagcattttcagtcatctcacaggtcaatggcacacctaacctaggcatcccattttgagataaagaaggacagaatttaaagtgttgccaaaagtcatccagcccaaaagagctgaagttatttaataattagaattatagaagtaattagaatcactaaaagttggttcagtgatgaaatcatgataaatattcaaaaattaacatcattcttaagttggcagtatcaagtttgaaaataaagtgaagaagaggtctcattcccagtggcctatgggaggcctacaagtaaatttaatgtatgtgtatgacctttgtaaagaaagcatccaaactttgatattcaagattcatacaaatttacaagtatgtcatattcccagaaaaattaaaagtgaaatatcacttgttccaaattatgaagtaatataatcccagggaaattattatattttcctcaagaattgactaaatttttcatctgatttgcaaaaataaacagttaagaaagtagaatatattttggaaaaatgaacagtgtgtaaagattacaggtgaaatggaaagcaaaagttattaaaacactgtggtttgcaaaaatagacattgatgagtagaataacatggagcagatttaagtagtatagaataaaatatagtgccctgaaataaggcctgtttaatatttgaaaaaggaggcaaaaattattttttaaagaattgctatcacagattagcagttttaagaaatagcatttgaatatttatatctaagtcacaacctatgctaaaataaatgtcaactgactaaaagagttaaatgttaaaatgttgtttttagaaaacgtacaaatagaataaaggccttaataaatatttgaagaagagcaatatctcaaaatctatggaattagattatataaattttaaaacaaatacacaacaaaaactgccacaaataagtaggcaggctatgtgaaatatttgcaccaaataggacaaatgattaagatcattgttatataaataggaaaacttgacagtaaaccagaaatatgataattgaccagactcagtataatattcaacctaataaaatttgcaaatttaaaccatattgaagtttcatttgctacctattcaataaataaaaacaaacatttcagatttatttttatgaaatattttatttacatactattgtgaacgagcagtttggctatttatattgagaactgtgaaaacgggattctggaaatttatcccaagaaaagaaaaagttggagaatatctccacgtgtataaaaatgtttattgtagcattatttacttataatagcaaaaaactagaacatatggaaatgcaacaatagggacagttttataaattatggcattttatactcatattttgtgacaagtaaaatctgtaatgtcacatggtgtagcaacacagaagaaattatactattcattcgacaagtgtttattgagtgcatatgccaagcagtgagcttaaagcagcaagcaagacaagtaagggttcctgtatcataagatataatcataggtgaaaaaaaatagtactatgtacactgaaatactggctttgtaaatcgtttattgaacaagcgaacaggcacaaaagcagccttacttgttgggataacaagattttgaggcaagtcttttctttgccttatatgatatttagtccaattaaaaataaaatcaataaaccaaaaccaagagtgtcgtctacatgccaaggtaatatgatagaccttagtgtaaatgggctttacttcagggctctttctctgcctttctaaatgtgtggctactgtggttgctctttaatgatcctcaaaggacctacaaatttgcctagcatgcatctaatcattcacagctgggcagacttcagctctcagatattagtggtttatctctccagttactgccctgaaaccttttccctgttgcaaaaggttaacttgcagatacatagttttaaaagaaagtatggtaatcacaaagccctacacaaggaactacattgtgactcctgaacggtaagctgctggcttcattgctcttgccacagattatttctttacaatgaggtgcagctaacactgttcacaggtttttgagatgtatgcaggtggagaatttagccaaagaatcttggaatcaacgtattcttctggcttattaaggaagcatggtgggctgtatgcatgtgtaaaagttactctgtaaagccacttttgtgcatgaagcttccaccacaatatgtatttcttttttcttttcttttttttttttttttttgagatggagtctcgctctgttgcccaggttggaatgcagtggcgcaatctcggctcactgcaacctccacctcctgggttcaaacgtttctcctgcctcagcctcctgagtagctgggattacaggtgcctgccaccatgcccagctaatttttgtattggtagagacagggtttcgccatattggccaggctggtcttgaattcctgacctcaggtgatccgcccgcctcagtctcccaaagtacggggattacaggtgtgagccaccatgcccagctaatagttggatttttaaatcaggctattgcagtctgataatcttactattttacataatccttgatgttgcaaatatgagtgacttcagaaggctgtaggtagtggactgaaagccctaaacatttccttaactttggcattttggggactaaaattgctttatcatgacattcctccaattagaatatgtatgattaaagcatttttgtcatcttgactttttcttctcttggttcctcttatgcacacactaggctggaaggggaatgccgtattaggagctcagaatccaaaaggaaagacaggtgtttggatgtcttttgagaaattgatcttaaacatagacattctaaggagttaagttccctactttccttacagtaaagaactttagcagtcattgatttagcatgctttagtaagaacttcagcatttagtaagcccctggttttcccaggccactggggtaccatataaattgttactattttattgagtttaggaaccacaagcccttcttttgtcttacaatgagtaaagatgttggaaagcagcacaatcaattagggatttgtttaagtctgactgttagactctaacacgatagtgtagaggacgtgattctgattttgtgaagcacacagttgaatttaagaggaaacattaacatacaggagttgattaaagaaaattaaatggtaacctggatgcattctaagtgccatgatttcagagaatttacattttattatctttctcagtgagtgtaatcacagtaccatcacagcacattattttaaggaccagtttacatttatacttgcagtttttaatttttcctctttgcccttttttgaggtagggggtgtttgattccaagatccctggtaatttgccagtttcagctagtccaactttcagatttcagctgaattattttttgaatcaagggacccagaacttaagcatacgtgtcataaataaaaagacaatacccctgccccaaccttttctaacctcttcttttggtaaataatagactgcagtgggctgcctctgcagtaatttcttattatgattcccacaaaagacactattctgttcttaccctcatagtgttattttagagttcaaggaaaagtagggagggggaagaacaaacaggctttaatttagaaagtcttttttttccatctattaagtattgaaattcatgtttagtctcatttgtctactaagaggtcaactttcatgatgtaaagggagcggctaacagtgtaacttggtcaactcagttaagccaagttgttgcttagttactgtgttgtttgccaaaagctatgtgacacatctgtcacttaaatgactgctatcagtttttgaaaatagtatctctttatctttatgccaggctcagaaaaatgctaagaggtagtacaatgaagagattaatttttaatttaaaatacattgatagtttcacaaaattatgcaaaatcaggatttgcagacagtcaaatgtggatttgagtctaagctcttcaactccccatgatcttgagcaaaaatctcagaatctcaaactcattttctttctctccaaatgatgagttataagcaatacttgtttcacaagcgttattgtgaggagcaattatatatgatagcgtctccagttgcattgagattttcttcaataggataaagatttatattggtaaatccctcctttatatttttatgtcagagaggatatgagaagttaaggtgtcaattaagtggatagaatagattgattttatcaagataagttatatatccaatatacaatgttcattttttttaaaggattcctccaaccctggtctcactcctagataattttcttccattttgtgaagataagtggttcttgtttgccgataaccatttttactgtgtattctatgctttttacaatgggttgtatatttgtaactatctttcaatgcagataattaaccaattcccagttttctttcaggtaaatgttggagatatagttataataaaaggcaaagagtatatacctgctgacactgtacttctctcatcaaggtagagatgcctactgatgctcaaacagtgtagaggatggtttctctaccctgcattgaccttgtgatttctccaaggaaataaggaataaacgaagaatttaaaacctctctaataatttttatttaaacatttaaaaaattgattggacttaaagggctttttcatgtttgccatatagaataagtgataggtactatactttatcattcaaatataattaagagtctactctccctctggatctatccagatcttttgtggggatcataactcttttaagatttcctgtcatttattttatataatacatggattgggttctattgatattttttatctttcagtccttgttcgtcataaatccctacagagtttcttgattattatgatggaatggtataaaaaaatggatgaatgattctttttgccattatgccttttgaaatgccatactcttccaacacaaaagtactttgctctttcttttaagttctttcagttacttaatttaaataattttcattttactcatattttaatcatgaattagtagtcagaacatatggcactgttactctttaaagaatgtgactttcaaatggttttaggtttaaaaactataaactagtcctattttaaattaagaaaaattgtttttaatattttagaggttgtttatcatcatttccttggacaggtttatttgtaaatccacatatgaatatggacagtgtccttttttcaaaatttatttaatcaggtcatcatttaaagtgatttgattcatgacaagttagcgaaacttaacaaataaaagtatttatactagatatttatagaagtaagtctacaaccaattaaagtaactgcaggtagttatatttctataattttgtgccatgtacctataggtttttgttttcagaaaaaataatatagatgttttcaaatcaccccctctgttcttagtttcctttgcttataactttatcaggataaatctctaaaactgagtgaagctaaccgtccattcttggcgtcttcagaattagcttgagggagagcttattgtcattgtctcaggttctaggtagtatcaggcactagaaagagctctctttagggagtgaaaagccaggattcttattctgatttggtgattttgaaccaactgcttaatctctcatgccttgatttcacatcttttatattaagatggattaaatgatcaaattccaatattccccaattctttttgtttaaattgataagctttaagagtaccttacagaatggtgtccattcagttttactaagtaaaaatgtgatgaatgtattggacacttggccatctgaatgtttgaagtcttgtgctgcataacaacattttggtcaattacgaaacacatatacaacggtggtcccataagattataatggagcagaaaaattcctattgcacaaatacttagtattgtgttactgtttctttacactattccatacagtaacatgctgtacaggtttgtagcctaggagcaatctgctataccatatggcctatagactataccatctaggtttgtataggtaccctctatgatgctcacacagtgacaaaaatgcctgacaatgcattcctcagaagctacacctgtcattgtcacgtgactgtatataagttcaaaatgatagtaacaccttctaacaatttgggaaagtattgttttcccaattaaactcttagagacataattatagaatgaatcatataggctgaaccgttaaatacaatttttatttttgatgctcaaaaatgtgaagataatcgactatactgccctgaatttgtatttaattttaagttggaaattttcaaaatctttgccgtctgactctatccaacttcagaaactccccagcaagctacttgtatttcttaaactttagaccacttttacagaatttgttttataagcattaaaaacacttactggtggctatgaatttcaatttatcgaaatagtttctgtgtcttaatatggtctccacagcgattaacttcctccaagattatatttttaaaagattatctgattcattgctttttgttattgagtagaattcaaaataaaagctgtgctgctagacatttcaatccaagtagcagagtaccacctttcagtattttttttcctcaaagggttttagcattacttagctcctttgaatctacattaacctcatgaaataggtagtagttgtttaatcatttaactgaaagagaaattttgactttaggtaatgactaagtcagggttggaatactcctaatttactatcttcacactgtccactatcaaaagaagtacatgatgatttttacccgcaagtgagcaaccacttagcagtaagagtaaacaactgtttataatattttaattttcaatttttttaatttttaattactaagagtacatcttctgtgaggtagtttgaaattaaagcatgaacatggttgaaagttactgtgtttcgtaggctttcattttgaaatgaaacagattttagcatttaataaataatgaatacatttatgtgttaagaaagtataaagtagggtaaaataactcaagctgttaattcaagtccatattctccgcatgtctatttcataccctctctgaaaaaatttctctggattcaaaggcttacccttccaaaacaatgcattctctagacttcattaattgctaagtaactcaaaaggctacagttatgccttctgacttcctaaggcataactgcaaagcttcctaaggcataatgcaaagctgacttctttgcagctttgcattaaagttagtaagatatttattcaattaactttaaaaatattttggagtcagaacatttttaatagtttttttttaagtggggcagggactagtatactttttttttcaagaccctatcacaaccctaaaaaataattttcattattattttcttccttttttggtacaagtggacatacagtagatggcatgaggttgagaaatttgagaaagaaaaatctagactataatgtagttctctataaaatatgctttaatttgataagcttatgagtaaacttttaaaaattaagttttcacactaaaactttaaattgggctaaaaagcaaataaataaccctcaaatattaaatgttttcttatgccttcagacctgatcaaaataagttttgaaaaaaattggcattagatgtttttattaacatgtattattttctataataatttcgaactttctgtctcttttgtccatttgtttgttttttttcctctgttcatttttttttttggccattttaattattttatactgggacgtgtaggtggcagtaggggagatagtgaaagtgaccaatggggaacatctcccagcagatctcatcagtctgtcctcaaggttagaaccactgagtcgtataggatgcgtgtatgtgggtcctcaccgtaaaccggagaacagttgcacccaaatatggttgagttctgtgtctcttcctttaaaacacaaactttttatactgcttggtgatggacatttcacagatgttttaaagggatttttgaatactatgttgactgatgcttgtccttcagctgggcaaattgaactcctgttgttatcaataggagtctaagaggcatgacagtaaaggtagattttaatttcctgtgcaccattaatatatattcgtatttaataacatgcctaagtactaaggcttaatttattatctctccgggatattattttgaataatgttaagcttttcatgaaacagtcattgaaaattgattagattataaacatgtcttattcttgtattttaaatttttctgtaagttctgtaaaatccttccagcgattgtgactataatttgggctcatagggtttatagaggaccccctgcacaaagctggatgttgcacattttgtaccgcatgctttgggatcgacttttatcccacttgtatctagtgacaaagtgcacgttactgtgatcaatttcagctgtctactagtgactgtattgtgatatgcatcttgtttcatttttcacttactaatcaaaaagcctgctttgcctctcttgactagtttgtgttttagatgtcatcataatttgctgaaatatttatgatctagcatgattccttatctgagacttcttgctgccttttcacagcactattaagaattgcttcagtaactgctgtcctaagtgattgttgagaatgttctgaatttcgatgcttattttattaccccaacttcaaatagaacttagccatttgaacttcctaacttcctagccatttaaagacctagataagttactttatgcaaaaaaaaaaagtagaattagaatattattctaattgtcagaatatggaatcaacattgtcatttagtattttctttgtcatcgtgcttctatattatcaggtgtgttttataaattcataaactatgtttcaaatgtatacataagtaaattacaaatttcgagcaatttccagagccaaattgctattgtgacagtgattttaaaaataaaattttgaataagttatagagtgaaaatataaatattgaaggacttaattttggggaaaagtagcagcttttacgaaagaaagctcatagggtaaattgaagaacctgcagagctactttaaaatgaatcagtaaaatatttttgattaatgtctatgtgtttaagcaattttcacaaatcttcgggccacaaaattaagctacatgcccatttctgaaactaggaatagtctgttttgcacatgtacaagttggaagttgattagaaaattccaggtgtttgtaatttgtaaatttttttctttctagctttgagtacacatgcttataagagattacatttataatacttatgtgatattagtaaattaagcctattatataaccaagcattaattagattagaatgcttttctttagaattaaggatcagattatacagttgggctacaaacttagatgtctgtagttgctgggcaagtcaaatcagcatgtgaaagggaaagataagacagtctgggctgtggtggtgtgataaaactggagaacatggaccccttaggccagccgccacacaccagattttactaagacacactggtggggaacccatgaagtgcatcttctaggtcaaggagcaatatggcctagctgactgattttagttttagtttttaccgctgtgagaatctctcaagcaactttaataggagagcaggagtggaaaacatagagggagaaagctatatatccgctttcattgtaaaatttgttcatattactttttttaaataaccttaaatttaaatattatggtttatgtgatcctattcatcatagctaaaagggtagtaaatgcaggtttgtagaactagcaatctggaattttctcatcaaccactttcttaaccaatttacatgcgtgccatgagcatgaaatctcatgtggtgtttttgagctaaagataaatccggacacaaaactgctttacatttcagatacagtctgtgttgtgtctatgtggatgaacaatttaaatataatgtgcaaatctattcatttgcattatcttgaagaccattactgattgttgtcaggaaattgcttttgggtccttctggctgaaaagctaatccgtgagttgtcatgcatgggttctgcctcacagcatcttgctgttagaatgaaaatcatcaagaagctaagtaactattactttgtctagaacgaaaggctttagtgagtctgagcatttaaataagttattattatgcttttcttcccgcactaaatctttgtgcttctcaactccaaactacagtgagccccaagccatgtgctacattgaaacatccaacttagatggtgaaacaaacttgaaaattagacaggtaagatctgatacaagtatatgtataatcactgctattttattacatggaattaagagcttctttctttgtgttattgtcttgaactaatctgtcctattgcaaatatgttcccatggaaccacaacaaagaggttttataaactggtattgttaagtattatggaagattctgatgtatttgtctggttaaatatgatctatcttatagatatatttgtaatatttttaattatgtaatagctaacactcagataatagtagttctaagtgctttgatatgttttaacttcttcctattcacctggttcaaattataatttgactttgccatgttaaaaagctgtacaagggccgggcgcggtggctcacgcctgtaatcccagcactttgagaggctgaggcaggtgaatcacaaggtcaggagatcgagaccatcctggctaacacggtgaaaccctgtctctactaaaaaagtacaaaaaattagccgggcatggtggcgggcgcctgtagtaccagctactcgggaggctgaggcaggagaagggcgtgaacccgggaggcggagcttgcagtgagccaagaatgcgccactgcactccagcctgggcgacagagcgagactctgtctcaaaaaaaaaaaaagctgtacaaggatgggcacagtggctcacacatgtaatcacactttgggaggccgaggcaggtggatcacgaggtcaggagttcaagaccagcctgaccaacatggtgaaaccctgtctctactaaaaatacaacaagtagtcggacatggtggcatgtgcctgtaatcccagctactcaggaggccaaggcaggagaatcgcttgaacccgagaggcggaggttgtagtgagccgagatcatgccactgcactccagcctgggtgacagagtgacactccgtctcaaaaaaaaaaaaaaagaaaagaaaagaagctgtacaacaagctcccacaacacaagtttactacataagctccattgtacacccctgaacctaaaattaaagttttttaaaaagccgtactttctattgccattcaaaaactctcactcatcttactcatcttggggaatagtttacatttctatatttacttttcatatcgtgtcaagcaaaaataactgtaaagtttttaaagttttaagagggactttaaaaatgtatgcctttggtttctagatgaatgatgaaaatgacatttgggagggttgggatgtgttggaactagatcatcacagagggcctggacccagactgccactgtgtgaggggccctgctcagtgacagctgcttctggttggccagagggaaaacctgttttggagtttcccttctctggaataaaaaaagagaaacaaagctatgttctttgaacacagattccatccattttcatcttgtttagattctgaagacagactcagactgtatagtgctaaatattacttttattttcacaagcaaatggttctttggggactgacttcaaattatctttgtagactagcttatagtctcctaaatatatttaagaactctcataaaggtgccctattcttgcgctaaaaacctgtgctcaagtcagggaggaaggtgtctcttaattatgatttgacagagtagaggagaattgcttataaaaataatgggatcttttagatcttaagacttggatgaattcaaaattcctcctctttgcccagatacaacttatttaatatactttttgcttatttaaaaattccaaacagggcttaccagcaacatcagatatcaaagacgttgacagtttgatgaggatttctggcagaattgagtgtgaaagtccaaacagacatctctacgattttgttggaaacataaggcttgatggacatgggtatgtaaaatccgtctttataaaaacacagaatccactgtgtcatagagtattgctgtgtcttctaagtctggatacatattatcttcttgtgtgctaagtttgagtcctcaaaaccctttttaaagcatttttattctgccctgagtccttctgtgaagatgttgaatcttatccattcatgtagtatagctgatgacttcccagagttcctgccaatctggctggaggatattttcagagatattcccagcttctggcacattgtttcgtgggtaaacaatgggagtaagaattacctgtggcttattctattctttggccaaatactcgtgttataggcttaactattcaatctgcatggcctgggtcctttcctgtgatcttgagatgcttcaaggagttcagactctaccttcaaggggtctattgtactggataatttattgtctcctccatgaaatttcaaatgttctttctagcctgtggtattaattatagtcatctcatctctttttgttacctgcttcctgcctctcttgtttcttctcttctaccccttccctcattcattcaaccagtacatattaagcacccagtaagccaagccagttaaggtgttaaggaggcaacagtgaacaaagcagataaatattcctggccttaagccttggtctgttcaggctgttgtaacaaaatatcttagactgggtaatttatgaattacagtaatttattgctcacagttctggaaactggggagtccgaaatcaaggcactagaagattcagtgtctgctggggcctgtttctcatagatgtcatctagtatgtgtcttcacatggcggaggctctcggacctcttttgtaagggcatgaattccattcccaaagtccccaccttctgatacaccgctttgggaattcagtttcaacatgtgaattttggggagacacaaactttcagaccatagcaccttgtgagcttactttcttgcagtaaggtaatggcaaacatacaaacaataagatgataaataagaagtttatactatgttagaaagtgataaatgctttgggaaaacaaatagcacagaataaggaagattgggtgtctttggaagggaacaactttttgttagggtggtcacagttagcctcattgaaaaggtaacatttgagcaatgatgagtgggaggtgaggacatttgccttttgaatatctggagggagataattccagatggaaggagtagtcagtgtaaattattagttctgtcattacatgatcttcaagtggaaaagtgcctggaataattgtggaatgttagggcagtgtggttggagtgctatgatcaatgaagagagtaatagaagaagggcctagagaaaatagagggccagatcctatgggctttgtaggccattgtgaggatgttactctgagtgaaatgggaattcactggaggattttgaggaagaaaggtcagcagttcagttttggactttataagtttggtccaaacagagatgtccaggaggctgttgaatatatatctgaagtttgggacagaagtctgggttcatgagatatgtttggaagtaagtggcatagatatttaaagccatgaggatggaagaaataactgagaatgaaagggtatagacagaaaactgaagagacccaagagctatcctgagaccctccaacgttatgttgggaaaggcaaaggcactagtgaaagagatggagaccaagtttataggatggtaaccaagagagagtgaagaaactgtaccaaagcagggggaccaaaactgagtctgacattgctgatggtcaagtacaatgagactgaccactaacatatttacgtttggcaagtggagatcattgaaattgattagaacaggtgcctgacgatagtgagtttgagaaaatggaagaagagttgaaaatagcaagtatagacttctttttcaaagagttttgttgcaaagagagcaaagaaatgaggcagaaactggcagaaaaggtgaagtctttcctgcttcccttctcccctcttttctcctcctccattcccttctttccctgcttcccctactttatggtataccttatctcccaggcattgtagtggccaactaaatgttggctaaatatactagttgaactcagcagcctgagagaatgtttttggtgttttcattattttgtaattgcattattagagtgtttgaattctaaaggacatttgaagtataccctgaactgtcatcctcattcagatcctccaaaagctttcctgtaatccgtgaagtaattatatgttgttctaaaattttcacagagtgatcgttccatgaacatctggttaaagactaatgatagatttggccatttataccagtattgtttctatagtctgacattcctaactggccagcttccatgtcttaacagttttctgtcaaattgttgctgagcaaatctatgctgtgaaggagaaactttgtatgatggtgccaagattcaaggtacaaagagaatttatataatatgctgtatttcatgtgaaagatagattttcaagacctttgtatctgtggcacttttggggtttacagtgattacccaaagctcttggagaccctttggaatgagtatactttgttgcttttaaggatgagggtcatagtctaatgccagaagccttggaacaccagctatgatgaaaactaactaattcttcttgagtccttgtaattgaaaagtggtatgttttgcttttgaagagtttgtgtctaattccggtcaatccacaccaccactgctgaggtgacagttgccatattataccccattggctgggtaaggaacagttgtcacacgtgtgtcccagagcatagtgcagcttcccaagaagttattggaaacccactttaggcccaaggcccctttcaactctgaaatgcacccttaatcttgagatatataccagaggggtttccttccagacaggtcctaaaggcatgctattgtacataaagaatgagagttgcaattgctttgttctttctctaaattggaatacagtatttcctaaggattcattcaagtgcaattgttacctacgcatcgggattgattttacctgtgtcagaatttgtgtagttcctgaatgtccaaggcccaagctgctactagccttccaagcctactgggccagagcagctcaccagaaatgaagacctcagcctcgctttgcctccacttacaaagaagttctgtgttgtctgtcgacttttcttgtggaattgtttccttctttttccagaatttttaaatatatttttctttatatttgaccttttttctcttattaaaatgaagacttggtagtagtaatccatgacccattaaaatttatgtattacattttcctcaagaactctagtattgtggtggctttgttccttcttatgtccctgtgtgagttgtatcacccagtaacctaccatagtgggtagccttgtgaaaaatccacaaaaataccaactgggaccttattcatgaaaaatgtgtcttaaatgataaggaatgaacagctccaaaatgcttactattcattggaaatttattcacaattcttgggaaaccaatcttcaaatactataaaaatgaatgttctagaggttttaagtacagggacttgtctgtagggggtcagggctggcaatgcaaataagtggtgagatctgtgtatttatcttaggaatttttttgcacctttattatgtacaaagctatttttaatttgggtggggggggagagagagtgtgtggggggtgggtgtgtgtggtgtgtgtgtgtgttgaggctgaggtgagtagacagattccttatccccatcacttcctaacacttttagaaatctaaatggacttatttaggaaaagttataaatagttgtgtaaattagcctctgaattccaaaacattacctattattttggttaatgtattagcttgctcaggctgccctaacaaaacaccatagactaggtggctttaatgatggaaatttatttttctcacatttccaaaggctaaacatctgagatcagagtacctgcatgattgggttctggtgagggtcatcttcctggctggcaaaaggccccttcttgctgtgtcctcacaaggacaagagtaaactcctcgagtgtctttttataagggcattaatcccttcatgaggacccaaccctcatgacctcttctaaatcacattagctcccgaagggtcatttccaaatgccattacattggtggtaagaacttcaacatgtgaatagtggagggacagagtgcagtccataccagatagtgaagttacagaaaatgactggttggtgttaaggaaaagcaatgtaaatacttgtgtcgttgctgtttaagaaaattatttgtactggggggaaattactttccagaaataaatatgagaagggttattttaataatgggtacttttgtaactatatggtaactagagttcttaagcattttagaaaatactgtttctaatgtcaacgtaatctgtcctagcaccgttccactgggagcagatcagattcttcttcgaggagctcagttgagaaatacacagtgggttcatggaatagttgtctacactggacatgacaccaagctgatgcaggtgaaatttttctctatgaaaccttttggacctaaggcttttgtgagtgtatgatttacagatctcagtgcagtggtcccaaacataggagaccatctgtcacagactcctgatccaaccctatatgttcagaatctggtactcctgtgagtgggaccttgaaattacctccctataagaatggcttgggctgggcgcggtggctcacgcctgtaatcccagcactttgggaggccaaggcgggcggatcacaaggtcaggagatcaagatcatgctggctaacacggtgaaagcccgtctctactgaaaatacaaaaaattagccgggcgtggtagtggacacctgtaatcccagctactcgggaggctgaggcaggagaatggcgtgaatccaggaggcggagcttgcagtgagccgagatcgcgccactgtactccagcctgggcaacagagcaagactccgtctcaaaaaaaaaataaaaaaagaatggctaactgcacacgggaatactggaaggttcaccagggattatgcatgaactctcaagaattttgtgtatgggtctatggcagcatttactaactattatagtgattattacaagtcgtccatgtcatgataagtgatctgcattaaaacatttgtcttgtaattttaatgcaatagtcaactttttaaatttctatcttttaataaaattttttagaaatttgaatcaaatgaccatttttcatagcatttatatgtaaggctatttttgccatcagctttaattcttgcattgatcttcacacctgcctacagttgctccgtccctgtgttataccatcaatattcaatagtcagatgggtgtggaaaacagttttaagaaactaaatgaaaatctgctctcagagctaatacctttgtaccttgtacaggcatgaaggtattatcaataggcaagcgagattgctgttagtgattccaccactagccattttataaattctataaatcttcatttcatattcattctgacatttaattttctgttctatggattttttggttagcacaggtctacataaccatttgaatcatcaaatacaactgaggcaacttgcctctgttattctttatagccaggactacttaaattgttgctgcgttcagtaaaacaattgctaaatgccaccagaaatttgaaagccggagatcctttaaatgttgccttcctatgttcaaatttccaggtgcctgtttgcgggagcatgggctgccttgtctgcctgtcttcctgaacggaaacactaaatgtttctagactaccctgtttgcttacatagccaagtaatgcattattcatcttacctgccacaatgcaaaagctatttttgcaaagggaatgtaatttcgttctcttctttcttatagtttacttcctagaaaaaggcctgggtggtgtagtggccttgaaaaaaaggtggttaaccattggcaccttattacatttgtcatgggtttcacataattttcacgtatccacccacatctagatactgagttgtgactttgtcatcctcaacagaatactaagtatagattgctaaatcattggtgtacattttttattactcatcttgtttctttttacagaattcaacaagtccaccacttaagctctcaaatgtggaacggattacaaatgtacaaattttgattttattttgtatcttaattgccatgtctcttgtctgttctgtgggctcagccatttggaatcgaaggcattctggaaaagactggtatctcaatctaaactgtaagcaataaagtgcttactgcacttttttagattaagacatgtatttgtttcacaattgatcttgatttactttatttcgtattgtttctaaaaagaccttgttgccaagatagctggacatttgatctttatttttcagtgagatttctagcaagtgtaagtaaaatttgggaatcctaaaatttcagaatccttaaaaacataatgagcactctatagtggtataaaatgttcactaagtatagtcatttattatatatatcaacgaaaactattccttaaaaatatttttaacataggtggttaactatatggtaaagaaagtagattgaccatgtgtggatataacaaaacatatatatttaaatatatattgtatgtatttataaatatataaaatattttaaatatatttaaataatataaatatttaaatatattttatcttaaataaaatatactttgtttatattttatttaaataaaagtaccaaaaagtggtttatatggtttaaaaatgtttaaacccaatgtattttcatttgaactcagtaatgtggtaagtcctatattaaatgttatcttagagaaggtgctagtaaatagttttcctttagagcatttatccttttattattgtgatattaatgtaccacccctggatatttctgtcaaatgagtttacattttcatttcatgagtacttagccaataaagacttaacttccaaaagtgtgaaagcaaattctagtacaatcacatagcaaaaactggtatttttaaattttttttattatattgatttatctttgcagcaattccaagttgtttttatagttactgatttattatttcagtatcagaactgttactaccatcagtctgtttctttgtatactttataattgtatctggtatagcagttttattttcattttgaggaagaagagtataatgtacctaggagaataatttacctaggactgaatattactcatatagtttggattgtttttgctgctgctgtcttgtttgcttttaaagtatgctttaaattggaaatactcttaagaatttatataaaagtgattctacccaattgagattttatatttataaaccctcagtgctatccctgatgtctctaaactttgtgtttggaagagggtttgcaatatttgacagtcctttcactgtcttagtacttttatacagctcttacctggattaacaacatattgaacacaatgcaattctatcttgaaggatgtacttgagaattaggatagattatcagcaaagtgttcctcccaaattatcaaataagctgcgtagtatggaaaacttgtattatgctaatttggggtcaatgcaaataaaatataaaactgtaaatgacgttcttcctgcctctcccaacagatggtggcgctagtaattttggactgaatttcttgaccttcatcatccttttcaacaatctcattcctatcagcttattggttacattagaagttgtgaaatttacccaggcatacttcataaattgggtaaatatgaattatgattgttatcaccctacaaaataattttgtccttaggatattttgatatctcaggagaaaaaaggttttaattatatctaccgtttcttgaccacagtatcagatttttgaacctaatttgttgcaaagttcctcatctcagaatcacacaagtttacaggccagacattgtagggaaaatgggtctctagttcaggaaacctatggtggtcgtgggagatggagaaccatgagtttggagttaagtgtctgaattatggttctagtattataatttactaggtgtatcaactttctcaagtcacttattttgaaacttattttcttgaacacaatcatagggataatatgccttacctacatcttacagtggttttatggactaaggaatctcttgacatagcaaagagctttgaaaataatcaatcactatacaaataatactgtaattcttactgatatcaaccagattatcatgttatatcatgttattttctacactgtaaacaattttagcttcacttgaatttttcttcataatttttctcttgaatattgttaaatattagaaaaatgttggacatctactttctaaatgtttttaaatgtcttagttttatttttattaaagttaaaattaatgaatttatctaaattaaatctgtgggcctaatctgccagaaaatttaatttttcttttattttgagaaactttgtgttatttttgatgtttctttctttttcaatcattgtaaagtctttcaatatgaacaatattagggtttcgaaaaatatgacatacttttgtaactgctcattatcttcttgtagcgaattatctacctaaactgtcaatctcttaattcattggtaagaaatcagtgtgatttagaaatctaaaatgagctgcaggtgtagctcacttcatgcaggagatatatggctgaaaaattacgtaataggatatgtacaaatataagtaagacttattgaagtttcttatagcaataatagggtaactcattgtgagaatcacataagtaagctagataatcactttgttgttttgattttcaaaaataatatctttcaaagaattatataattttagtattggatgaacccagcaggcttatgctttcaaccacctttctaatatacagagattttataacatctgacagatagaacactgactttccagccttcttttacaaagcaactttcttgtgtgaaaatgagattataactgtcttcctttgattctggttcttcccaatggatctattaagaaaatgcttaatcttgtttctgaatgatagtcttgcaaaatatctgaactcagctatcatgccaattctatcctatcttttcctttctaattaaacattccccgccttctgttgtccttcagttcatgtgatttccagattaatctctattctgatcactttctcttctgaacaaaggcccagttggttaatctctctcttaacacatggcacataaaactcaataacctatttcagaagtgatgttgatcagttcagaatacagacatgggagagatgggctttgaattttgaccttttcatttgacatgaaaatttgtgaactacaaccctgatttgttaataaaatagtctaatatagaaaatgttaatttcataggataatatagtcaagtctcatgattactggacacaaggcaagtacaaataagtaaaaaactatgctctttttttttttttttttttttttttttttttgagacggcgtcttgctctgtcgcccaggctggagtgcagtggcgcgatctaggctcactgcgagctttgccacccgggttcacgccattctcctgcctcagcctccaccgtagctgggactgcaggtgcctgccaccactcccggctgatttttttgtatttttttttagtagagacggggtttcaccgtgttagccaggatggtctcgatttcctgacctcgtgatccgcccatcttggcctcccaaagtgctgggattataggcgtgacatttttatcttttgagaagtgcattttgtttttctttcttggcccagaaagtaaaaccagatagaatctcttgggtactttttccaggggtttgaagacctaattatttgagcagttcttagttgctgagttctagctcacattactaaatacctgccttgtgtcggacacagtaggaagcactttgtgtggtatcttttaatccttataataggtcatttatatagaaaatggtggaatgatagtaaacctagattgcatgattcatagacaggctctaactaccatactgttctgcccttactgtggaatatagtagtctgtattgaatacttttcagaaaaatcgaattaaatggtataggaataacaggaaattagtgcctacatatagttcatcaaacagtgacttattgaagtacgaatatactaattgttttcttttaaagtttcacccaattccttattaccagttgtgttcaatgatttacttaattttattaaaggatcttgacatgcactatgaacccacagacactgctgctatggctcgaacatctaatctgaatgaggaacttggccaggtaaactcaatttattgttgattatgtgtggaattaaaaagttagatttggtgtggtatctgccatatatgataactgcagatgaatggacagcttttaattttccactatttgaataatatatttgttagtgcatgatgaacaattctcatttttaataaatcagtttttaaaaacactgtctcaaggagattttgctctcaaggtaaagcactccaagagcttcgagatgtcccttggtatatagtcaagctagtatgcaacatattggctattttcaagttataaacgtagttttagaattgttcatacctttcagccaggaagggaggaaaagttcatcaacgaagctatgtgagtctagtcaataggaatgttagatttataattcatactatattcacatatgtgtatatttgtaatccattaacatattctaggtttttcttttttgtattgttgccatattccaacttatgctttacaaatagcatctagtccagaattattcttatttcttaccagttcagatgttgcatgaagttaattgcgcaagctgttacaaattctacaattgcctgttgcattgagaaatgctgatagctgtttcagtgctctgtaaatgttaagtagtggtagtggcactttctagtggaaattcagaccatactaaggcatatgtctatatagttttctagtatggtgatagtctttaatattcatatgtgaaaagattcatttgtaaaatactttttaaaaagctgaatatattccttgataaatgggcagaaaatagttccttagtaatattcattgtgcccctgcaatgttaataaaaagcatgaggggtttctctgtaaaagagtggcataaagactttcaaaatattaatgagaaattttaaacttttttaggttaaatacatattttctgacaaaactggtactctgacatgcaatgtaatgcagtttaagaagtgcaccatagcgggagttgcttatgggtgagttttttcctttaattaggatatgaaatacatgcttaattagtgctaacagtttggtacatttgggagttcttattaggggagggtatggggttgtttggttttttttagtctgaaaagcagctgttataattttaggacacatgtatatttcgcgtttctagtttagcattgttttcatttgggatgacatgaggtgggtgctctgcccaatggtattttcagtgtttagtgttgctgaaagtctctctcttgccctggtaataaggaacaaatatatttccttttacactactataaactggagtatagcttggatctggtaaggacagataatcaggccttgagcagttttcaagttaaaatagtgacagttaccccttttgatactttttttttcttctatcatctctcctttttgcagtcatagagcaatctaaaattctgatgatggaaaggaggtagagacatgaaactcttgaatctggaggataattaatatcatcagaaacttttatcaggctgttaatttctttagaattgcttgttgagcacccatttaatttatttcttacttccaggtatgcttacaagctgttccatagccttctctttaaaatattttatagggtaatgtgagaaaattaatttctacatttcctagaaaagacatcaaaaggtgaaacactctcctggctggttgacattggcctattgtcaaacttgccaattatccttatctacctagaagtgagactagtaaatatcagcctcctactcatacaagcatggacacttgcttctaggttttctggcttgcacccactcttccccactcactctgagcagtaagccagtgacaaagagtgttacattttgaaatgccttagttaaaattataaataagtaaacatttcatgaaaaatcccaaaagtatatggttattcctagatatccttgttctttgcgttacgagagcatgactaaaaatgactataaactatatgtataaacgaggttaaaaaggcagttgagtggctttttcacactgtaaagacagcctgttgatttaagaagcatacttactgcttcccgggctggatgctgtttttcatctttcttctttatctgaagatgttctaatttccttagatgtaagaggctcacctgcctcctccaccctcctcccaacaaattgctactggagcaggagagttgcagccacactttttgacatcttgtacttatatattctacccacaatcatcccagaggagaaaagtaaagcctattgcaattctagagttctcagatttatgatgatttttttacacaaattctgtattcattcataactagtatttccacaatggcctgtttaataattggcattgttttttactttgtgtgattttataattcaataagcaggttcatcaaattagtaattattgattgtgaaattttcagaacagaaagctaaaatcagatctagcctctgttttcttccgcattttatcaggttttttcttattcttggaagaggtccttaaacactcctaggcagtagttctaaagagcagtgcccatctgtgtctgttgacaatgtcatcattaacaactgttatagggtgggtctgagctcagtattgtcatcattgagattaaattgccagtgaagtgaatttcttcctgaggaaataatatttcttaatcctgagatacagtcagaagccatgagttctggctttgtctagaatttaccatgtaatcctagaaaatctattttcagatattccctactctttaagatgtggatagtgagaccaaaccatttctaaagtccttttccagatacgaaatctaacataatgtttagaaataaacagaagtttatttgtttgcaaattttaactgtataagccgaaatctgtttcctttttagttatggtatcatattttcaaggataccagaagccatgtagagtaaagctagttaaactgcttccagtgatcatgtttgtgtatgtgcttttaggcatccttaaccttgagtttttatcagtgttccctcccaaacacatcctggtggattattggactgttagcatcgtagagagttgttgatgtctgaaagttttggagaaaccgtgacttctgacttgaccacatgtttacagcagggaaaataacactgttacttaattacagccagtctccatggttagatgtgaaggggtgagagagagtaattactgtctagcacttttctgtgtagatttcctctgggcactcttggattatgggaatccagatgggggaaatgacctggctttgctatcttattttccccagagcagcatttaacaattgcttaatatgggaactattatgtatgagcacttttaaccccagtggaagaaagcaaggtgtttatgcccctagggaggtggcaaaaccagagagtaacacaaaatttcatatcctgacaaaagcctttggtgttacaagtgcagagctgattttgcctcagtgttgccaaaacatcaggtacagctcagtttcaccccagatagggttcaagtgagttctgttgtgtcttatcagaagaataaggcttgaagtttcctgatagtataattcctagctagttctgggtattccatgtttgtaagaaaattataattaacacttaaaaccgtgcatcagaatttaattttaataaattttctttgatttccctgaaccttcgccccaaattggattcatgatgggcaataaaatagatttgtacatagttgccaatgatgattatcttgtagaaatcaacttttagttaggaatgcactgcaaaattattagattatttcattagatctttttatgggacaattacagtaaaatgtaagtgaattgtgatatcatttgtaaatttaacttatgacaaaccagacattttactgtaaacattagttattaaagtatcatttcagctaattgcttcttgtagggaataagtcagttttataatagttacttgaatacccggaataggtaagcagtttctctgttcaggggccacaaatctcaatagagtgaagattctgggatacagtcctaagtgccatctttgtaaaaaaaaaaaaaaaaaatttagaccttttagaataagttggatgaggcttaacaagatacagtctataaaaagaaattctgttaagcaaacaaaatgcttttttgtgtggacaaggcatttaattcgtattaaaaacatcatttgcattttccctttaaatgaaaaataagtttttaaaagcaatctttatatatgaatatactgtgtgaataactttacttgacagtatttggtttagctatatatttgctggaaggatcggctacttctttaaccccaagaagagactcaccacgagaaatttcacgattatcataatactatcccccaagatcttgctacagccatgtttatcttactgctcaccatgacttgtgataaattctagtcaactccattcatttatttatctgtatatctcaagtgttgatgtatgtgacactttgatagataatgcaggtaaaaaaggcaaaagttcacatgatttcctcctgcctaaagtgtatagtctaattggcacttagtggatgctaattaagtaatcatacagacaaatataaagtcctaacacagtatagaggtctatgtgaggctataatgggtggtttgatctaaacagggaaggcaaggaaatatgccctaagaaagtgattctggagttgagatctaagaatgaatttgattaagtgaagaacttaccaggtagatgttatagcactggcacatacaaaggcaaaaagccagataccacgtagacaccagagcttctggagcagcaataacagggaaacttgcatataggatcagtggcaggtttgcaggccacctactgctcatcgggctctaggtagtgctcagcattcttccagggctgcgccagagttgtgaagagggtctctggcacttgagctctggagcttttaagctgcatgacttgggaaactttatcccctgtcctggtatgagattggggctagtgcagcttggcaggaccatgcacagtgttgcttggttagtaccaggcccttccctggcacagtccatgggctagggtccaagccttgaggctgatctgaagtgattgctttaaacatggagttgcagccagtttccacagagctttgcagcatgccaactccttttcttggagtccagcccacaaagggcttgattagcccttcttcttaagcaggcacaaaagccctttggtaggagagagaatagtgagttaaaagggaccacctccattgtgattggagtgatatagtggatactgcactggaagcaaattaatgttttggtagtggaagaggtgccttggaatgatgaagtccctgccttggctgggttgatgaaagattgaacttttaggaagtgaaaggatcccatgagtttttaacaaagtttattgtatattcgtcaaaaataacagtgacttttcatttgtactgaactctgcattttaaaactccatgtctaataaatttacaggaaaagtatatgattatattatgaaagaaatggaaaataaaaaaatctggtctgtcatgtattatgggccccttccaattgaatacatgactggctgaaatgaagtacatctatcagactttcctagtgttcagatgagcgaatggatgaaattaaagaagatattaatgaatatgtttcctgtttgaaataaagagtgttttaatgagtgaaatagtttaagtgaaaattttttaatatcatttaaattcttaaactaaggttccatttaattatagaaatgcaggtaacttttactttaatgtacctgttgaagtaaccatcatctcgtggtagccaaagttacttctaaaatgtatttgacaaattttattagtgtgataatttgtttcaagatattagcatgtttgttaccttgaaacactttattctgattatataacacatatgattaattttccattggctttagcatttcaactgctaagttgaaataattcctactgaattatgaactttgtgaataaaatcagtaaatgttctggtgaagaggcaaattggctatacagttacaggataactttgtaaacctgctgagctaccatgaatcattatgttctatttgctgtactaactgccattctttcagattcaactaaaagttcattttgttaacttttcagtgatccatctttttatacttcccttcttcgtggttttatgtttccagcctttctgtgattatttttcctctctttctgcctctcttcttgctttctgaagccatgtccctgaacctgaggattatggctgctctcctgatgaatggtaagctctatggaactttctgcctcattgatccctataaaaggtttgcattttattgttttgtaagacacatttcactctcttttatataaatatatatatataaataaaatattgctgagcagttagggtaacaatgctgtaaagtagatatttcttgaaatctattgaatattcctgatttttgatggagaaacatgtagtttatagattaggtttgccagagttttacattgtttatctgtaataaagtctaatgatcaattccagagtgtgggctttggactacctcaggtttcagctacagctcctgaagccgtcaggtttttctagctcagtactgccaccttctgccgctacttatgtactttacagagctaccaaaagaggctactgaaacatacccaagcagtggaaattttcttctgtgtttcttacgattattctaataagtctgtgtgcaggctatgaagtgaacgtttttaaaatctgcaccaaatgttagaaaactatgctaccaagcactagagttaactttagtatatttaattttggcatcattaaagttagcgttttatgggtttaatttcactattttatgagttttttgttggttttaccttaaaattcctcccctttgtgaatttatattttcatcttggatagtgcagatttattttgatatttctataattcatcatgagttggtgggcaaatgaaatttcaggaaatatgttcctttaatgttggtaactttagaaaacattgagaatttataggtcattccatttttattttcatattactcatgtatttggtgacgaagccacattttcaatatactttgaagtcgaataacatcatttaaatatttttcaacagggaatttatttcagtgaagtgaagatttggtaaaaattttcagtaaatctcacaacacctagggttaatgacaggcagctgtttggttcttgtgacaactgatgagacaccacatgcccattgcttggagtgtcgtacattttgacacttacacacaagtaatttttaatatttttaaatgtaccaaagcatcttactattagtggataattcaagtttaatattgtatatattccctcttatttaatcctttgagaagtagttaaaatttcgactatatctgcttttctataacattaacataattctattaattttaaatattgttcattagcatagaagtgatatatatatcctctaaaataactcagttattcctaagaagaaattgccttctccatatttttcttaatgttggaaggaaatgttaaaaattgatgtttgtttactcacgtcattcaaaatattctactttcaatagaggttgtttcataacttttattggtgctggaaagagcggatgttattttatctagtttagtaagttctttttgtaaaacacccttttggaaaacttgatattctaaactaggtaactccaaataagaaattgtcagctttgtcataaattgcttgtacatttccacttatagttacatataagcttagatagtaatgatttttaaaaataacaatagggaaggctttcactaccgttacagtaaagtgagttgtttgttaagagggagtctcactctatcacccaggctggaatgcagtggcacaatctcagctcactgcaacctccacctcccaggttcaagtgattctcctgcctcagcctcccgagtagctgggactacaggcatgcaccaccacacctggctaatgtttgtatttttagcagagatggggttttactatgttggccaggctagtcttaaactcctgacctcaggttatccgcccgcctcagcctcccaaagtgctgggattacaggtgtcagccaccatgcccagcctcaagctttattttaaatatatacttggattctccatctataaaataagtaattacctataggcctgcaaaaatgaaagaacaaatgtttcctgagctgctactgtgtccaaggttacgtggagtgatcaaagatgtgggctttggatactaagcaaccaagttcagattttcattctactggtactgttgaacaagttactcaactctttgcctgaatgtcctcatctggaagaatgtagataataatagtagttgcatcatcaggaggttttgaagattagatgagctctgtttgtgtagtgctttggatagtgtctgcacatagtcagcccacactgagtgttagttctggtgctctcacttaatcctcatgacatatttgacatggccattttaaagttggtgaaattcaggcaaagaagcagtttgccccaaattataaaaacgagtagatgatgtgagagttgaaacctacatcagcctggttataaaacagtactggttacattacatcctatggactctaagtaactttaaagaatatctgctttttagatcacaagatatccttgaaatttcagtcattttaccttgatatttctctttttcatttaatatttttcaacctagaatttctttcagtaaatttcttgtggtgttaggcaagagcagattaagcaggtaaaatttaacaagtttgtgtaaagttagcatgagggcatacaactttgcacaactttgagcatttgcccaacctcatccacttggtttcacattgccaatgaaaccaagatcaaaagtgtgatcccagttgaatcctgtgctccaggcatctgactgcatcttcatgctgatcttcaggagtaaagagtatagatgactctataaatccaaaatctgaaagggcattccaatatggctgttcagcagcttcagtttcatgtaaagttcattgaattccatgtataaaacccatgagcttatgtgtattttactgcccgacttgaaccagtattcacaaaaatgccaaattaaaaaaacataattacctcttagatatatgtagattacatatttacatttagttgagtttgaaggcaaacctataatgtattaagtctttccacatattctgttaacattaaagataatcagatgatggttgtagctctactcgcttaggtgtattaatataaatagtttatagagataaaactatttcccaaccagtagctacctactgcagattaacctggttttctcatcattgccaagaaccatcagctagcatataacctcacagattaattcctttttattaaaaatctactgctctagattgatagtatcaatactttggattgaaggggaaaatctatttattcttaacatcaatgtagccctaagatatgctcattttctaaaactatatatttctataattattttttatcattttctgtcttctgttgtggaaaattttaagcatgaacaaaagcagacagatgtactgatccacctgcttcaataatatgcacttaagaccagttcatttatgcctttcccccactatcattttgaagcaaatccaaaataacatattatttgttttttctcaactgtttaatatagtttcacattattcttgttgataatcgttcaagtaaatgctagtgagggtgattccccagaaggatcaccttaaagtgttctgtgcttagtcatttcactggggtttttagtattatcacactatcagtggatagtactacactgtattttctatcctctggtcttatttattttctcatttcattctggtctgtagttatgtatgaagtgagtggtattcatttattctgccgcaaaagctaggctcactaaaacattcttccaggtgtgactgtataacaaagagatctgacacatccaaattaatgttagtcttcaaagcagtcaccttggcagatagtttatttattccagtaaggcagccatttcacagaatgtttttgaaattcctcttttgtaattgcctttagaaagatgttgagtcacatagtgtattagtccgttttcaagctactgataaagacatacccaagactggacaatttacaaaagaaagaggtttaattgaacttacagtcccatgtggctggggaagcctcacaatcatggcagaaggcaaggaggagcaagtcatgtcttacgtggatggcagcacgcaaagagagagcttgtgcaggaaaactcccccttataataaccataagatctcgtgagacttaattcactgtcacgagaacagcacaggaaagacctgtccccatgattcaattacctcccaccaggtccctcctataacacgtgggaattcaaggtgagatttgggtggggacacagccaaaccatatcattccaccccggcccctcccaaatcttatgtcctcacatttcaaaaccaatcatgccttcctaacaattccccaaagtcttaactcatttcagcattaactgagaagtccacagtccaaagtctcatctgagacaaggcaagtcccttctgcctatgagcctgtaaaatcaaaagcaagttacttacttcctagatacaatgggagtataggcatgggataaatacagccattccaaatgagagacattggccaaaacaaaggagctacaggccccacgcaagtccagaatccagcagggcagtcaaatcttaaaggtccaaaatgatcccctttgattccatgtctcacatccaggtcacactgatgcaagaggtgggttcccattgccttgggcagctccacccctgtagctctgcagggtacagcctccctcctggctgctttcacaggctgtcattgagtgtctgcggcttttccaggtgcatggtgcaatgctagatccactgggatctagcattctggggtctggaggatggtggccctctgctcacagctccactagggactctgttggggggggctctgaccccacattttccttctgcactgcgctagcagaggttctccatgagggacccacccctatagcaaacttttgcctggacatccaggcattttcatacatcttctgaggtctaggcagaggtttccaaacctcaattttccccgccccgcaaccccagacagaattctgctgtcttgtccaggctggagtgcagtagtgcaatgttggctcactgcaaccttttcctccttggttcaagtgattctcctgcctcagcctcccaagtagctgggattacaggcatgtgccaccatgcccagctaattttaagtatttttagtagagacagggtttccccagttggctgggctggtcttgtactcctgacctcaggtgatccacctgccatggcttcccaaaatgctaggattacagatatgagccaccacgcctggcccaaacctcaattcttgatttctgtgtacccacaggctcaacactgcatgaaagctgccaagacttggggcttccaccctctgaagcactagcctcttttagttatggctggagtggccgtgacacagggcaccaagtcctagactgcacacagcatggggaccctggccctagcccatgaaaacattttctcctaggcctctggacctgtgatgggaggggctgccatgaagacctctgacatgccctggagacatttttcccattatcttggggattaatattcggctcctcgttacttatgcaaatttctgcagtcagcttcaaattctcctcagaaaataggtttttcttttctatcacattgtcaggctgcaaattttccaaatgtttatgctctgcttctcttataaaactaaatgcctttaacagcacccaagtcacctattgaatgctttgctgcttagaaatttcttccgccagataccctaatcatctctctcaagttcgaagttccacaaatctctagggcaggggcaaaatgctgccagtctctttgttaaacataacaagagtcaccttttctccagttcccaacaagttccttgtctgcatctgagactacctcagcctggaccttattgtccacatcactatcaggctttagtcaaagtccttcaagtctctaggaagttccaaactttcccacattttcttgtcttcttctgagccctccaaactgtttcaacctctgcctattacccaattccaaagtggcttccacattttcgggtatcttttcagcggtgccccactctactagtatcaatttaatgtattagtctgttttcacactgctgataaagacatacctgagactgggcaatttacagaagaaagaggtttattggacttacagttccacgtggctgggtaagcctcacgatcatggcagaaagcaaggaagagcaagtcatgtcttacatggatgccagcaggcaaagagagcttgtgcaggaaaactcccccttgtaataaccatcagatcttgtgaaatatattcactgtcacgagaacagcacaggaaagacctgcccccatggttcaattgccttccatcaggtctctcctacaacatgtgggaattcaagatgagatttgggtgggaacacagccaaacaatatcacatagaaaaccaggcctcattactttggtcaaaaccagtatctaacaaaaatattattattgaattcaatcacttgctcatatttttggactctactttggactttactttgcagccagttgtaccattgaaaagcaggaggtgcagaactttcccccaaaacaatgctttcttagccaggtcccaaggccagaggtcccaggagcagcagcagcagcagcagtgggtcccccaggagagcctctaaggtcacacagggtgcccactgcagacaggctatagtgcatggtgcctcctccctgacaaccacctccacttcacaccagccacagcaaggaactttggcaccagcatggatctctgcctgctgccgatggcatgactgtcgaacaggtggtgttccatcagttctttataccaagtcctttgtgaagcattccacagagcatgtgtcaatggcatgtgttcacccgacctccaaaatagaagagactccaagacaaataggagatatcatcagcgtgtttcatcacctctgacatctgagagaaaaaagaaacctgagcctctactattggatcaaaattacgttaacttaaagaaccagattataaaaagcagaaagatgagggctccaagagccagacttttgtcacgatacccaccattagatcatcattataataccttcaggtgttacagtgttagtgcaactaacacctggcccatacgtcatggaattgcacaggagggcacaggaaagcctcatgaatgtcttaccaaacagggagagaaatggaggcagagcgggagctaggagcagtttttaggtccctattgagatccactccttccaagaggaggaagagccacagagctcagctccctgcaggtctaagtcaaagagccagtgacttctgttgagatgagctggtggtgctccctacagaggctccctgtgtccaaggactacgagccccctacaaaagtctcacaagtcttagagacagacctcatccaattcatgaagccactcattggagtgggcagataattctgaaaatacaataagaaaagttgtaactacagagatcagtttcagggtggttgaggttgtgagtgggccatcactgtgagtgggactactttgggaacagcagacatcagagggtaagccaggggtcccagagtcactagctgacctcaggccttttcccagagggatgtctggagggctgcctacctttgagccattggcatgtccacctcagtgtgagtggccccacattacaactctttctggaaaaggttattgaccctggaccttgtgatgaactttgaaatggaattgaggagaccataagtgctcttcaggccggcccgaggcccagtgcgcacctgtcccagtgcgcggcccacctgagcagcagccgtgcacacgctggataaaaagcaagtgcacttgtcctcgtttgtgtggcttggtgctaacaagctgcctcttcactcccaaaccaatactcaattacgttaggccaataaaatggctatattcgcttgaatttacatatatatgtttcagtggctcgcaatatgagaaaaatgatcttaatagctccattatctatccatgttataaataaacatgtttaaaacaagttaaagctacatatgagaactcagaacctgaattttccacttaaaacttgttaaatgggaaaaatattaggttggtgcaaaagtaattgtggtttttgcaattgttttttaatggcaaaaatctcaaattacttttgcaccaatctaatatttagatctgtgttgaaaatcatagacttttctctgtgcaacctaagtgcaggctaccagctcctaaataaagaaattccctgtatgtgcatgttatgtagttaaacaattctgtctactcaggacatttggaatgttaaagaattcgtaatttgtcattctgcttgcttaagtgttcaaatgtgtacacaaccatgagttcccattctagtggtatgtctgagctgccctccctgttccttactcattaaagtgatgaattttgtaaaaacaaaacaaaaacccacacaacaaaacggtgttattttaaagttatcctgcttttttcgtgtgtgcatgagtgtaatatgtatatgtgtataatgtgcatttagtgtatagatagggtgtttatttcagatgactgatgggttttgtacttgttttaaatttgatttttttaagttcacaatgcattaacatattacaaattcaaggagtgtaaaagaaaaggttttgatcccctccctgtcttagagccctccatttcccctgccaaagacagcctgtgtgactaatttcaagtgtatctttaccgatctcttctataaatattcatacatttattttttctctcttatttttacagaaagtgaagcatactgtacacactgctttgcaccagcttttcatttgacagtgcatctctgagattttttcatattccataaaaagcttccctttgtttgtaaatgcaccacagtatttttaagcagcactactgatgggcctttgtgtttcctaactctttgctattaaaactggactgtaggggttgggtgcagtagctcacgcctgtaataccagcactttgggaggccgaggtggatgaatcacctgaggtcaggagttcaagaccagcctggccaacatggcaaaaccttgtctctactaaaaatacaaaaattagccaagagtgatgacacatgcctgtaataccagctacttgggaggctgaggcaggagaatcgcttgaacccaggaggtggaggttgcagtgagctgagattgtgtcactgcactccaagtgagccaagactgtgccgttgcactccagcctgggtgacagagtgagaccctgtctcaaaaatcaaaacaaaaaacaagtactgcaaagtataaatttgtacatatagtattttataccagttaaacaatataaattcctagaactggaattactgaatcaaagtattttaaattttaaattttgcccaattgcttttcttttagaatttgtatagtttatgttctcaccaatgatacatgctttactattttcctacaattacaacagcacaaagttgtcaagttttatttttgccacaatgatacatttaaatttcacctctctcattatgaggtaaagttgaatgtatatataaagccatttatatttccttccttgtgaattgtgtgtttatatcctttgctcattgttgtactacattgttgatctttttgtaaattgatttctggtaattctttttattccatggaaattagcctttataagttggaaatattttttcccagtttgtcatttagcttttgacttttcttgcagaagttggttgtgttttgttttgttttaagagatgatctccctctgtcacccaggcaggagtgcagtggtaccatcatagctcgctgcagccccaaactccagagctcaagggatcctcccacttctgcctcccaagtagctgggattacacaccaccagctggtgcataccaccagacctggctaattttttaattttttgcagagacaggtcttgctgtgttgcccaggctggtttcaaactcctggcctcaagcagccttcctgcctcagcctcccgaaagtgctgggattacaggcgtgagctactgcacccggcctgttgccatagtttttgctatgcagaaatatttagatttatgtagtcagatttatatattatgttttctgaattatatatgatacctaagctttttccattcctaagttttttttaaaaaaatgtttcacatatctttagtacatttataaaatcattgatccatctggagtttattttggtttacaaggtgaaaagtatggattcagctcttttcttccttttctctgatggctctcctgttgacatgaattttgaatttaaaaaaaagtcttagtacatactgtcatatgcaaggacaactatactgattaagccatatattctttgaatattttaatttttattgctatagagattcttcatttttgtttgatcagaaaatgagtagttacaatgtatcataacttttaagtcagcctaaagaagctgcaaattatatgacattgtgggttccctgctctgttctccttaccttaactgtgatactccctgccttattgcttcttgcaaaataccataacgtcattgtctccttgggagcaaagtgacactcaaaaattactaggcaaagatgtaaccaaatgttgatgttggcttgcatttttatttgtgaaagtttgactaacagtcctattatttttacttttaatgtgatggttcttatttttaactgatatgagcttgcaaattttatctgtttatttttactaaaagtaaatattttgtaaaattttggagaggagtggtggaagctccatgccagagttatccaacccaggctgtctgattagaggatgagttgtttctagtttttgtttctggtttttttgtttttgtttttgtttttgtttttgtttttgagatgtagtcttgctctgttacccaggctggagtggagtccagtggtgcagtttcggctcaccgcaacctccacctcccaggttcaagcgattctcatgcctcagcctcccgagtagctgggaccacacctgactaatttttatatttttagtagagatggggtttcatcatgttggccaggctggtctcgaactcctgacctcaggtgatctgttcacctcagcctcccaaagtgctgggattacagacataagccatggtgcccagcctgttttggggttttttaaattatcttgggaaggaagtcactttctagaagaagagttctttagcattatccctgacagaactttcattactgaatggaaaatggggtatgtccatgtaaatatttcaattgcatatccagagctactcaaatataaatatgtttgaaaattaagtcaattatagtaactgatttataaaatgaaagaattattggtgagattaataaggcatatcttcagatttaaacggcttttagtctggaattctttggaaagaaaatagacttcttgcaagatgttactgtgaatattccttgacatttgtttaacaagtagaaaagtacagctacaaaccatttatgaatatattttaataggaaaatttcataaagccccaagtaatgaactctttttaattaatggtgatatttggaggataaatatatgctatctttttcttagatttttttccttccatcttcaaaattagagaaataatgataatgatgatgatgacgtgttcactttggcccccaagggtattttgatcattctaaactactacctgctaataaagatgtattttcttacgatttggagacttaatagagcaagttactacatgtagatatgtgttccattataaacattctaacttcctccttaagtttactggagaaatgtgtttcattgaagatactatgtatgttctctcctttcaaattctgttttcttcaaagagttttccgtcctgtcaagctgctgcctttacaatatgacagtcttgatatctgacatgttgacattgataatactctttgtaacctgttaatgttgtgatcaaaagctttctggattataattgtttagtattggacacatttttttccctcagtgaaatctgaaattttcttctgtgcactaaacctcaaatgtatatattttcactaaattttgcaaactatacccttttcttttgacattcccacttgtgttccttgtttttcctttgaatctcagtatttttatgttaaattgtatggccgtgagataaatgatagctagtttgcagagataattgactccatttatatcgtatgaagtacataatacatttgctcatctgaagatagccacaacacaaaaattccatacttttattatttgttcttatatttacagaacaaatgtaatatgtttataaatatttgctcagatattaatgatagatgttgatataatctgtaaatggtttattcatgttcttatatttcatatggttttcatcactacatataaagatttctcatgactcaaatagaagaatattttgtataatagctttcgttaattcttagaatcctaaaaattgaaaatattatggaagtggaagaaattcaattccaggtgttttaatagttttagttttatatttttacaaattttatgtggctgcgatataatttaactccagaaaaaatgaactgtaaaatactatttttcattacactgcaaacatctttcacattttagaatgcttgaatatattttgtgatacaatcatgaaatctgtgatgtcttacttagaaatgcaggccaaattacatttaatttattgagggtttggagacataacactttactcataaagtacattaacaaatagatcagtgggctggtataaatgaactgggtttactctattttttacccccttcaggcagaactcacagtttggagatgaaaaaacatttagtgattcatcattgctggaaaatctccaaaataatcatgtaagttacataaaaccattgtctttttgttagtgaataaaaactaatgaatgtttctctgaactatcttctatgtttacatgtttctctttttttactttcatgatcttttatttatttatttagttagttagttagttatttgagacagagtctcactctgtcgctggggctggagtgcaatggcgtgattttggctcactgcaacctctgcctcccagaatcaagccatttctcctgcctcagcctccccagtagctgggattacaggcactcgccaccacacccggctaatttttgtattttagtagagacagggtttcgccatgttggtcaggctggtcttaaactcctgacatcaggtgatccaccccctcagcctcccaaagtgctgggattataggcatgagtcaccgtgcctggcctcattatcatttttaataattatcaaaatctatgccaaatcctttttacttggccaacattaattcatggtggttattaatttgattttaatattatcattcatcaatattctgtcttttcaaattgtttcattttaaatgattattgaaccttctgtgatacaattcaatattaacaattttagaaataagttatcgaaataacttatagaaataagttatctgctcagtaccataggctaaatatacaatagaaactctggcttctgccacccaatgtgaaaatcctgcttatgaagttactgactgtattagggttctctaggggggggcagaactaataggatagatagatagatagatagatagatagatagatagatagatagatagatagatagattagatagatagatagatagatagatagatagatagatagatagatagatagatacacacacaaaggggagtttattaagtcatattaactcacacaatcccacaataggccatctgcacactgaggagcaaggaagccagtccaagtcccaaagctgaaaaacttggagttcaatgtttgagggcaggaagcatcctgcaagggagagatgtaggctgggaggctaagccagtctagccttttcacagttttctgcctgctttatattctggccatgctggcagctgattagatgatctgccttccccatcccacttactcaaatgttaatctcctttggcagcaccctcacagacacacccccaggatcaacactttgcgtccttcagtcaagttgacactcagtattaaccatcacactgacactcagttttcataagatcaagttatagagtcttctggagttaaaccccggaactttttctcataaccacttcaaacccagtatgtcccaacttgaactcatgattgttaccctcaaatatgcatcttctctagcacaggtggacttgtcacttttgcccaagtggggccctatcagtatgttgctaggggtgtttttgtatctctcttttctgcgcgagccttcaacaaaatattaacttcaggatctacaaagcctagccctagaccacctcttccctcttggattctcagctttcagtaaatcataccatcacctatcttgtgactcttcttaggaattagagggttgtctttgatgccttcttttctctccatgtccagatctctgagtcaccaagtccttgttggcactgattgctagaatctatcttgggtgtcggctgcagttaatcctcattttcaccaccccagtccagaccgccagcacccactctgtggattcctgtggtagcctcctggccagtctcctgggttccatttttactcttctccagttattgttgcccatgacagctgaaaaatgcaaatggaaatcaagtcccctcactatcctgtttaagcctattctctgcgttctctcttcactcataaagtaacatgatctggcccctgcctaagctgtcaccctcactttgagctcctttctcctcatcccactggctgccttttattttctaaaacacatcgtttttttccttctttacgacctttcctgcttgatggaaagcactttgctcaattcttcatgaggctaaaacttcatcagctcaaatattacattatcttgagaataaccacagactcgctcaagtcacattacatgatatttgcatattcccttctttacagtgcttgtcttgctataagtaaacaatacgtgtatatttatttgtgttcggtcttccccacaacgccaagcttcacatggcagggaccatgtctgtttagtccactgttctagcttgaacacagttttttcaaataatgttctgatatatctccctagtcacttcacattattattttttttttgcccaagagcatagagaaatgtttttcctttattaaattgaatgacatttctctttattgagagccagacaggaagatatgtaatttaaaatatctggcttctctcctataaaccctaagctccgtgcagaaaggatacacccttctgtcttctcaggctgtaagagtcccctggacataggagttgttcataattttttgattcattaaaatatgaataaagttaccatttttggagaggaaagacaaagcattatagaaaaatcctcaatcattatcaccccaacgcaaagtataaccccagtgcagtaagattgcatgcctaaaatttaaatctgatcaggaattacaactaggtaaatgaacatcttcgaatttttatcctgtcctccaacgacaagattcagctacatctgcctttctcactatactatttctatttgacaacaccaagttgtcttgtataaatgtttagaaaaggaatgaaagagtagaaaaataatttgaattaaaaaacacattttctttataattgatgttggcttcttagttggctataatcccacacccccagtgtataacagctatgtttttatggggttttgtttgtttatcttgtttgttttgttttgttttgagacggagtctcactctcttgtcctggctagagtacaatgttgcaatctcagctcactgcaacctccgcctcccgcctcccgggttcaagcgattctcctgactcagcttcccgaatagctggcattacaggcgcctgccaccacgcctggccagattttgtattttcagtagagacggggtttcaccaggctggtctcaaactcctgaccttaggcgatccacccgcctcggcctcccaaagtgctgggattacaggtgtgagctaccatgtctggccaacaactatgttcttaatagacatgaagtaatattactgtcagtgtcaaaatgttcacatgagaagggcttaaattatgtgtttatttttcacagccaactgcacctataatatgtgaatttcttacaatgatggcagtctgtcacacagcagtgccagagcgagaaggtgacaagattatttatcaagcagcatctccaggtacaaatgaagcaattgtaaagtattgttttgtggaaaattgttctgaatgtaaaagtcaatttaattttaaaaagatagccaaattgagtgttttttagataaaaatttttatttaccaattagaaaaaccttggctttcaaggttaaatatgtacatgatattttaaaatgtgtaactttgtatatgtaatttttggcatattacataagttacatgaaaatgtgaataacgtaattctcataagtgaaaaatgtacttttttacatacacataataatttttcgcttctttataaatacctaagaactcttagtcaagctgattttgcacaggtacaaataggaaaaggaagaagtgttcgcctgaatatagtaagcttatataactttagaacaccaattttgccttcctcttttgttaatgataataaagaagcttgtgtatttatttgggtgaggaaagttttacgcatttgaagggattccataaaatattattagtacagttatcagtattaagtacttaggcttaattttagatctgttttcaatgtaaagttgggcagatagtcagtttgatgagaactttgttagaagtgttttaaactgcattctaagccagcatctgtgacttataggatatactaacttccttaaaagcataagaattgttatgtctcatatcattagggtagaaactatgtgatgttttcttatgccataccctactctagcaataaaaaggttttatttaacatgatgaaattcatagacattaaaatcattagttcatttaaagcttgtttaaactgaatcctcaattagcaatattagtttctctagactcaacattttaggaggaaaaggataaaagtttagaaggcaattttctctgattccttttgagaaagttttctagcaaatacactggatgaaagggtacatttaaattaagcttcttaggaatttgtgactaacagtgagacttgacatttcggaaatgtaactctgagttctgtatgtgtctccaacacttaagattattatcctcatttctttggaattgtcatgtaattttaaaataattggattaataacatgagccagaataaaaagaactttaattaaacagaaaattatattaccttaatgtacttctcttgtgctgagaatatttttttttcaatcatgtgtttgcttttacctctttttctaaaacagatgagggagcattggtcagagcagccaagcaattgaattttgttttcactggaagaacacccgactcggtgattatagattcagtaagttagttgtttttaaggttctttttaatccaagtaatacatttgcatagcttcaaagataaagtaataccaaaaggctcatagtaaaatagaggttccccactccagaagcaactactgggtgttcttttagctatttctttaggcatttatacatctcatattttcaaaaaataaaggtgactattaatacatgttttgactcttcaattttaatgtatcttctgattctgttacatgagggtgtatctcttgaatcaccatccttttagtttatccttcctcatactcaaattattatgattttattccaatttttagttaaatactcaggcccaagttttaaagtgggcaaaagacttgagccaacatttcacaagagaagctatatggatggccaataagcatgtgaaaaaacattgttagtcattggggagatacaattaagaccacagtgagatggcactacatacctacccaagtgattctcccacctcagcctcccaaagcactgggattacaggcatgaaccactgcacctggccactttttcttttattttctaaagactaaattttaaaaatggatagcaccaaatgttaatgagtgtgtagaacaagtgggatactcatatactgctagcagatgtgtaaagtggtaaagtccctttggaaaaccttacagagttgtctaattgaggtaaacttacacctgagccagcaattgtgctcatagttatatagcagaaatggaagtttctgtttctaaaaagacttggaacaaaatgctcctatcagctttattcagagtagccaaaaactagaaaccaaaccaaatgcccatcaatagaagaatggataaacaaattgtgatacagtctcacaatggaacatctaaacaataaaaaagaatgagttattgattcatcaacagcatggatgaaaaatgaatcaaaacatgaatcaaaaacattatgccgagcaaaaaaaaaaaaaaaagccagacacaaaggagtgcatcctttttaatttcatttttatgcagctcaagatcaggaaaaagtgatttatggtgatagaattcagaacagtggttgcctcagggcagggaagaggttgattggaaaagggcacaaggggatttataggatgggaatattttatatcttgattggggtgctaattaccacactgcacaattttcatttgactctgtgttaaaggtctgtgcattttattatatataaattgtctcatttaaaaattattatttagtttctgtgtagtattgccttctattttacctgtacagtattcatagctgaacatcgttgtatttggtaattatttttttgttttttaaattttgtgtttcccaacaccaattattttttttagagatggggtcttgctctgtcacccaggctggagtgcagtggtgcagtcatagctaaccatagccttgaacccctgggctcaagtgaccctcctgcctcagcctctaaaatagttgggattatagataggcatgtgccaccgcacctgatattttttttaatttatttttttaatagagatggggtcttgctatattgccaaggctggtcttgaactcctgagctcctttgattctcccacctcagcctcccaaagcactgggattacaggcatggccaccagacctggccactttttccatcattttctaaagataaatctcttacctgtttgtttcattgcttcccttttttcccccctattatctatattaattgttcccatactttctagtatacttttctcaatacagtcacaccacataatctgttcattggcagttctttccttacgacatcccttttgaagccctccattctcttgtctggacaggttatattctaagaactcttcggtgacactttttggttttccttttggttttctcctgttttggattttctgtttcctgtaactcaatttacgtaaaagttagtaagctcccttccatatttcagcagggaaaatttgtttgtgttggcattttttacagtaaaattttatggctaggatttatttcctagaagcttaagacttttccaactgtatgtaattatatattccttttcttcttagctggggcaggaagaaagatatgaattgctcaatgtcttggagtttaccaggtaaaacatctgctcagtgatttgtatggataagataaatttatatccatttttattttttcccttttgaataactagaaagtatgttttgtttttatttaactaaatttgtttagacaaaatattaaatcaaaatctttagtacattttttattctcattatctgtagataaattacaaaccactttcttcagagtattgcaatgcgtgactactggttgcagttttaaagtctttttgaaagttgatctcatggaggtaaagagtagaatgatagataccagaggctgggaaggatgtgtgagtgggaggggaagggataaagagaggttggttaatgggtatgaacacacagttatgttgaagaagtaaattctgatgtttgataataaagtagggtaactatagttaacaacaatgtgttgtgtatttcaaaatactagaagagaggacttaaaatgttcccagacatacaagtattaaataatcaagatcttgcatatcccaaacaccccaatttgatcattataaattctgtgcatctaacaaaatatcacatataccccataaatatgtacaaatactgtgtatcaattttaaaatttagaaaaagaaatcgttttgaaatatagctgcctgattcacaagcccagcgtatacggccatgcgtcttatggctggtgatctggaaacacaattatgtttagaggcatcagatttatgtggggtggagatgagtcgggatcaggaagccggcattctaattgtatgctcattatatctaattgtcttcaggatttgaaaaaccgtattcttgtctctgttaagtataagaccagttaccatctgttaggaaaggacagaaagcaaagtgattgtcctacttattttatttcttaaggtcgaataatagatcccttcagttataatcagtgataagcctgtgagttttcagcctcttactcccacgtgacaatgtaacctgcttacctgcattcttgaggcagagaggcccttgctgcagggtctttaaagactgcgtgaccattcacaggacacttcacagaattaaggccatgaggaagtaatgctgctgctcaaggaaataagtgtccatcatttttcttgaactttcttctgcataagacaaacttgtacattgcttaggaaaggcatttctctttctgtgccaacttttgttgctgtcttgattaggagtgaccatatgccagtggttaataacaaaaataatgcagtctgtctgacttattatttaaagctttttttaacttagatactctgaaaagcccaaagaagatgaatacattgaataaacagaatggagtattttcaaagtgcactcctcgtctctttcttttcatgtcagagtgattgcttttcccaagcttatttgtattatatctgtagactgtcattaagtagtctattaattgccatttagatacgttttttaaaccacacttagaaagcactatgctaggtgatgagtgccatgaagaaaaaaataaagcagggttgggagtttctgttctttcaggactcaatgatgaaggtgggtttaagaatgaacatgagaaaagtgaatatgatgctgttaaatagtccctatgaaagacattagtggtttagactaggatgatggtagtgaaaataaaaggaagttaatagaatccgtgtaccttgtagaggaatatctgagagactttgtgagggattggcagtagaaggcgaaacgaggaaggggtgagggtctctggcatgaacaactgggtagatagaggtaccatttacacagatggcagaagtgggaataggaatagatgtggaggttgaaatgtttgaagtcttaggttttagatgactgtgagacatacaagcagagctatcaggcaagcagttgaatataagggcctgaaacaaaagagaaatctatggctgaaatagcaatttggcagtcagtggttggtaagtggtatttgaagtcataaaactgaatgggatctcctgaagagaagatataaaatgagggggaaatggaaggctgaagattaagccatgagggtaagggttgattagaaaaagaggaatcagcaaaagagacaaccttgttgttaaagatgtagaggacagagagagggtcatagcacagagccaggagaagaggattcaaagagagagtggtcatctgtgtcggagactgctgcaaggttaggtaagaagtttgagaagtatttgttgaatgtagctattcattgtaatggtgaggagagaagaaaaaggaaaagactgggaatgaaggggatagatgagtgatggtttagagaaggtgaaatgtgaaagagttgaaaagggatgtggcttaatggaggagtggttgcatcgggtgagtttttttgttttttttttttttattatactttaagttttagggtacaggtgcacaacgtgcaggtttgttacatatgtatacatgagccatgttggtgtgctgcacccattaactcgtcatttagctttgggtatatctcctaatgctatccctcccccctccccccaccccacaacagtccccggtgtgtgatgttcctcttcctgtgtccatgtgttctcattgttcaattcccacctgtaagtgagaacatgtgatgtttggttttttgtccttgcaatagtttgctgagaatgatggtttccagcttcatccatgtccctacaaaggacatgaactcatcattttttatggctgcggggcgagaacagagtatgttaaatgcttatcaccaggatccttacagaaggagaagaggcagattctggggagaacagcataacctttggaccgaggttactgagaaagtgagatgagaggaggttcacaggcatgtgtaaggaaggcctctgataagaggaaaatgtttcttccatcatatcaggaaaaaagatggaggagatggtgcacacatagatatgcaggttttaatggcagaaagaaaagggatttcttcccacccccaaaccgagacagagtgtctctctgttacccagcctgcagtacagtggctcgatctcagctcactgcaacctccgcctcccaggttcaagctattctcatgcctcagcctcctaagtagctgggattgcaggtgcacatcaccatgcctggctaatctttgaatttttagtagagatagggtttcaccatgttggccaggctggtctcgaactcctgacctcaaatgatccccctgcctcagcctcccaaagtgctgggattacaggcgtaagccaccatacccgggcaaaaagggatttcttatctgaggtttttatcaaggtgaatttttgtcaagcttctggggtgaggagggaacgcgggagacttggagaatggagaaggtgtgctgtagccctgcacagtgcaagagagcaagcttgttggaatgtgctgggttactgggcagtaaggagcacccagttggtgttgtatatcatgtatttgctagtctctatggccgggtaacttttcttcagcaacatctacctactttgatgtaacacaaaagagagttctcattcacccaatatttggaggtttcaccaggaaaagagaagagcaaggacattgatgagtttgggaccacattatcaaagctggagtaaaagaggcatgaatcaggaagggctaacgtagaatgtataggtgtcattacaaaggaggcccaattaaatgtattcctgatgtacagggatagagactggggtagtaataccaggagcattatggataaagaaagagggaacttaaatattccttttttttttttttttttttgagacggagtctcgccctgtcacccaggctggagtgcagtggtgcaatctcggttcactgcaacctccacctcccgggttcgagcgattcttctgcctcagcctcctgagtagctgggattacaggcacgtgataccatgcctggctaatttttgtatttttagtagagacagggtttcaccatgttggtcaggctgatctcgaactcctgaccttgtgatccgcccgcctcggcctcccaaagtgctagaattacaggcatgagccaccgtgccaggccgggaactgaaatatttctaaatacctctgaaagaaactcctgactgtacactatgataccataactgactgcttctgcatattgaactcatctcagttttttagctggtaaaacaaatagatacagacatttgagtagtcctcttctgccctcagttctgaggaggatgcttacacactcatggtccaaatgagtcctatcctttgtaatgctgtcgcagtttcttccattcagtgttatttgctatctctttttactaatgcattgaaagatgtacatttgacagacagttcttattaaactatgtcatcaacagtattaaaatatttgtgctctttagcttaattttgctgcataaattaagtttttagcatgatgccagtggtttgctagtcatcattgaaaaactagttgtgaatgcttaagttgttttttaaagtactagtatttgccttcatgtgtgatggggtgtcactgattgtcatttgtatttttaataacaattgatttgtattgatatttctatttttcataaaaactataacataatttatcctttaagaaaccaacttaaatattttttcaaatccgaaaacattgaactaggactttactctggtgggtatgagctcttgtaggtttcttaggaactattttgtcaactattccactagaagagtagatggtaccctggtgccttaaaagcataatgtaacttttacaggtgcccagctgtacacccaagggatagtttgtgtatgtggaaggttagggctcatgatttggtcagatttatttttttactgtgaatatcaaaatatgtgaggcatgacaaacacatacatgcatatccttggtatgatgacacattatgcaaaacctctttctttcagtgctaggaaaagaatgtcagtgattgttcgcactccatctggaaagttacgactctactgcaaaggagctgtaagtttttatttttattttttacagttataatttatgatggtttataatgtatatgttaggcattctatggaaatgtaacacagatgtttaacatgaagttgctgacatccacttttgttggtgttttatagtaatagtgttcagcctcttctggtgaaatgtggaattccttctgggtaaatttggtgctttgaaaaagtttggcctaggttatttttataattcaatttttgatacataatatttgaggtttatactatataaattgttagaagacagttaaatacagaaaatatttaaaaattgtattagaatgtgattcactctagtttgaatctaattttttaagagcatagaaatgggggaaaattagatcacagttactaccataattatgtcatgggactaatttgtcttgcattgttttaattataacaatttctgacatggctttggtatattggcagcttatattgacagaaatagtaatatgttattctaactgaatttctccagttaaatatatttatactcatgggaaaatgagaaatctgaccagggcccttttttttaattgagatgagtcagcattttccttctgaactgttctttccatttacctagtttataaccttcccaacttggaacattcctattttgaatagagtcaacaaccttgctttgtctcatagaaactcggaaattgaacttaagaagctcaagcctattatttaaattcattttgagaatgttaaatgccttggtttaaagacaatgaaatgcaatttttgaatgccttgattttaaagcattttggtagaattatttcatgatgtctcatgaatttagttttagaattcttttgattttgtattctcatcgattaaaacacctaacattttttcattgtatgcattctaccatcacagttcgaactgcattttggagataggaagataagacctaagacttgtcaggagcttagactagtcagagaaatattaaataaaaagaagattgggatacaattttaaagtgtattgtaaagatcttccacatcccaaaagtaatattcagtgataagggaataaagagagactttaacacatatacaccatggaatactatgcaaccataaaaaaggatgagttcatgtcctttgcagggacatggatgaagctggaaaccatcattctcagcaaactatcacaagatcagaaaaccaaacatcgcatgttctcactcataagtaggagttgagcaatgagaacacatggacacgggaaggggaacattacacaccgttgcagggtggggggctgagggagggatagcattaggagaaatacctaatgtaaatgatgagttgatgggagcagcaaaccaacatggcacatgtatacctatgtaacaaacctgcacattgtgcgcaggtaccctagaacttaaagtataataataaataaataattttttttaaaaaagagagcctttaagaccttccactttaaatggttgataaatgtccagtttacaaaacccgaatcacatcctttcttgtatagtttggaatcatcttctacctagaaacttgtttgaggagttaaagctttgaataaaaaataaaaaatgatggacttccatttttaataatcatagaattagcttgcatatatttttgctgttctgaaaaaaaatttaatatatttcatatagactttatttttaaagcaattttaagtccccagcaaaattcagcagaagatagagtccacatatacaccctgccatcacacacacacatagcctccccattatcaacatcccccaccagagtggtacatttgtaacaatccatgatctacactgacacatcattatcactcaaaccctagactgtacatgagggttcactcttggtattgtaaattctataggtttggataaatgtgtagtgacatgtatctaccattatggtatcatatacagtattttcattgccctacaaatcccctgtgccccgcctagtcatttatctcttccctcaaggccctggcaaccactgttgcttttactgtccccactgttccttttactgccttttccagaatgtcatatagttagaatgatatggtatatagcctttctggactggcctctttcacttagtaatattcatttaaggttcctccatgtcttttcatggcttgagagcttgtttctttttagcactgaataatccattgtctggatgtgccacagtttatgcgttcacctgctgaaggacatcttggtctctttccaattttggccattatatgaataaagctactgtaaacatgcatatgcatgtttttgtgtaaacataggttttcatctcatttgggtaaataccaaggagaataattgcaagatcttacagtaagagtatgtttcattttgtaagaaactgacaaactgtcttccaagtggctatgccattttgcattcccattagcaattaatgagagcttttgttgctccacatcttcacccacgtttgaagttgtcagtgttttggatttgggctattctaatagatgtgtactggtattttattgttggcttaatttccagttccctgaaatatgatgttgaacattttttcatatgcttatttaacatctatatgtcttctgtgatgaggtatcttcagatcttttgcccattattaaattggttgttcattttattgtagttacttttttatttttttaattgtatttattcatttattcatttatttttagagacagggtctcactctgtcacctaggctggagggcagtgatgtgatcatagcacactataacctcagattcctgggctcaagtgatcctcctgtctcagccttgtttttattacttgtacacatttatggggtacatgagaaattgttacatgtatataatgcagagtgatcaagccaggatacttagagtgtccatcagcttagtacaatacatcttttgtggagtatagtcaccctactcgggctatcaaacattgaattgattccttctatcatactgtatgtttgtactctttaacccagtcctctttatcctccctccttccatcctcctccctctgtctcacccttccctgttggtgtttgtactttctacctctatgtgatcatattttttttagctctcacatataagtgagaatatgcaatgtttgtcattctgtgcctggcatatttcacttgataatgacctccagtttcatctacgatgctgcaaatgacatgatgtcattattctttatggctgaatagtataccattgtgtgtatatacacctgttttttttttttatctattggtctgttgatggacacttaagttaattccatatctttgctattgtgaatagtgctgcaataaacatgtgagtgcaggtatcccctttgatatattgattttttttttcctttgggtacttacccagtagtgggattgctggattgaatggtaattctagtttctttgagaactctctatactattttccatagtggctgtactagtttacattcccaccaacagtatgtaagaggtcctttctctccacatcctcgcctacatcagttatttgttgtctttttgataatagccattctgactggggtaagatacatctcattgtggttttgatttgcctctgattgctagtgatgttgagcatttttttcatatacttgttgaccatttgtatgtcttcttttgagaaatgcttactcatgtcctttgtccaccttttaagggaattatttgttgcctgttgtttcagtttcttgtatattctggctattagtcctttttagggtgaatagtttgcagatactttcttctattcaacagattctcttcactctgttgattgtttcttttgctatgctttttagtttaatataatcccatttgtgaatttttgtttttgttgcctgtgttttcaagatcttggtcataaattttttgcctaaaccaatgcccaggatagttttccctaggttttcttctagtatttttaaaagtttgagtcttatgtttgtttttaatccattttgattttttgttttctttgtatatggcaagagataagggttcagtttcatccttatttaggatgggtttttagatttcccagcaccatttattgaagaagaagcatgacctttctccagtgtatgttcttatcagctttgtcaaagatcagttggttataaatatgtgactttatttctgggttccctagatttatgtgtctatttttgtaccaataccatgttgtttggttactatagccttgtaataaattttaaatgtaggtaatgtgatgcccccagctttgtcctttttgctcaggattattttagctatttgggctctgttttgattccatatgaattttaggattattttttctaactgtgaagaatggcattggtattttgtttttgttggggggggggtattttattttattttttagtacatgaataaattcttcagtggtgatttcagagatttccatgcagccatcacccaagcagtgtacgcgatacccaatatgtagtcttttatccctcactcccctcccacccttcctctccccccaggtcccaaagtatgttgtatcattctcgtgtctttgcatcctcatagcttagctgtcacttatgagtgagaacatatgatgtttggtttcccatttctgagttacttcacttagaataatcatctccaattccatccaggttgttgcgagtgccattatttcactcttttaatggctgagtagtattccgtggtatatacagataccacattttctttatctacttgttgatttatgggcgtctgggctggctccatatttttgcaattgcaaattgtgctgctataaacatgtgtgcaagtatcttttttgtataatgacttattttcctctgggtagatacccaggagtgggattgctggatcaaatggtagttctacttttagttctttaaggaatctccacactgttttccatagtggttgtactagtttacattcccaccagcagtgtaaaagtgttcccttttcaccacatccctaccaacatctattattttttgagtttttgattatggccattcttgcaggagtaaggtggtatcacattgtggttatgatttgcatttccctggtaattagtgatgttgagcattttttcatgtgtttgttcaccatttgtatatcttcttttgaggattgtctgttcatgtccttagcccactttttgatgggattgtttattttcctcttgctgatttgagtttgttgtagattctggatattagtccctcatcagatgcatactttgtgaagattttctcctactctgtgtgggttgtctgtttactgtcctgattatattttttgctgtgctttttagtttaagtcccatctatttatctttgtctttgttgcatttgcttttgggatcttggtcatgaagtctttgcctaagccagtgtccagaagggtttttctgatattatcttctagagtttttatggtttcaggtcttagatttaagtctttgatccatcttgagttgatttttgtctaagatgacagatgaggatccagttttattcttctacatgtgacttgccaactatcccagcaccatttgttgaatagggtgccctttccccactttatgtttttgtttgctttgctaaagatcagttggccataagtatttgactttattactgggttcttcattctcttccattggtctatatgcctatttttataccactaccatgccgttttggtgactatggccttatatagtattatatatagtttgaggtcaggttatgtgatgcctccagatttgttgtttttgcttagtcttgctttggctttgcaggctcttttgtggttccatacaaaatttaggattattttttctaattgtgaagaatggtggtggtattttgatggaaattgcattgaatttgtagattgcttttagcaggatgtcatttttacaacattgattgtacccatccatgagcatgggatgtgtttgcctttgtttgtgtcgtctgtgatttctttcagcagtgttttgtagttttccttgtagaggtctttcacctccttggtcaggtatattcctaagtatttttatttttttgcagctattgtaaaaggggttgagttcttgattctcagcttggtcactgttggtgtatagcagagctactggtttgtgtgcattaattttgtatcctgaaactttgctgaattcatttaccagttctaggagctttttggaggagtttttagggtttttaggtatatgatcatgtcatcagcaaacagcgacagtttgacttcctgtttatcagtttggattccctttatttctttctcttatctgattgctctggctagaacttccgtattatgttgaataaaagtggtgaaagtgggcgtctttgtcttgttccagttctcgggggaatgctttcaactttttcccattcagtataatgttgactatgggtttgtcatagatggcttttattaccttaaggtatgcctcttctgtgtcaatattgctgagggttttaatcataaagggatgctgggttttgtcaaatgccttttctgcatctattgagatgatcacgtgggggtttttttggtttttttgttttttttttttttgagacggagtttcgctctttttgcccaggctggagtgcaatggcacgatctcggctcaccgcaacctccacctcctgggttcaagcaattctcttgcctcagcctcccaagtagctgggattacaggcgtgcaccaccatgcctggctaattttgtatttttttagtagagacagggtttctccatgttggccaggctggtctcgaactccagacctcaggtcatctgcccgccttggcctcccaaagtgctggctgggattacaggcatgagccaccatgccgggcctggtttttgtttttaattctgtttatgtggtgtgtcacatttattgacttgcagatgttaaaccatctctgcatccctggtatgaaacccacttgatcctggtggattatctttttgatatgctgctggattcagttagcaagttttgttgaggacttttgtgtgtatgttcatcagggatatcggtctgtagttttttttgttttatcctttcctggttttggtattgggggatagtggcttcatagaatgactctgaaaggattccctctttctctgtcttttggaatagtgtcaataggattggtaccagttcttctttgaatgtgtgatagaattcagctgtgaattagtctggtcctggaccttttttgttggtaactttttaattaccatttcagtcttgctgctgatctgttcagagattctgtatcttcctggtttaatctaggagggttgtatatttccaggaatttgtccatctcctctgggttttctagtttatgcacatagaggtgttcacagtagccttgaatgatcttttgtactttggtcgtattggttacattatagtatctcctattttgtttctaactgagcttatttggatcttctctcttattttcttggttaatctcactaatggtctatcgatgttatttatcttttcaaagaaccagctttttgtttaatttatattttatagttgttgtttcaatttcatttagttctgctctgatcttggtaatttattctgctgggtttggggttggtttgctcttgttcccctagttccttgaggtgtgaccttagattgtctgtttgtgctctttcagactttttgatgtagacatttaatgctatgaactttccccttagcaccccttgtgctgtgtcccagaggttttgatagtttgtgtcactattattcagttcaagtcattttttaatttccatcttgatttcattgttgacccagtgatcattcaggagcaggttatttaattttcatgtatttgcatggttttgaagtttccttttggagttgatttccaatttgattccactgtggtctaagatagtacttgctataatttctaatttcttaaatttgttgagacttgttttgtggtctatcatgtggtctatcttggagaatgttccatgtgctgatgaatagaatgtatattcagcatttgttgggtacaatgttctgtaaatatctgttaagtccatttgttcgagagtacaatttacgtccattgtttctttgttgactttctgtcttgatgacctatctagtgctgtcactggagtatttgaagtcccccactattattgtgctgctgtctatcccctttcataagtctagtactaattgttttataaatttgggagctccagtgttaagtgcatatatatttaggattgtgatatttcctgttggattagtccttttgtcattatataatgtccctctttgtcttttactgctgttgctttatgtttgttttgtctagtataagaatagctactcctgcttgcttttggtgtccatttgcatagaatatctttttccacccttttaccttaagttttatgagccctaatatgtcaggtaagtctctcaaagacagcagatacttggttggtgaattcttatccatttacattcaatgttagtattgacacgtaaggttctattctattcatcatactatttgttgcctgaatacctttttttttcattgtgttattattttacaggtcctgtgagatttatgctttaaggaagttctattttggtgtatttcaaggatttgtttccagatttagactccttttagagttcttatactgctggcttggtagtggcaaattctctgagcatttgtttttccgaaaaagactgtatctttccttcatttatgaagcttagtttcgctggatacaaaattcttggccgataattgttttatttgaggctaaaggtaggtcctcaattccttctaacttgcagggtttctgctgagaaatctgctgttaatctgataggttttcatttataggttacctgatgtttttgcctcatagctcttaagatttttttcttcatcttgactttagataacctgccgactatgtgccgaggtgatgatctttttgtgatgtatttctcaggtgttctttgagtttcttgtatttggatgtctagatctctagcaaggccagggaaattttcctcgatgattccttcaaatatgttttccaaacttttagatttctcttccttaggaacaccaattattcttaggtttggtcgtttaacacaatcccaaacttgttggaggctttgttcattttttttaaattcttttttctttatctttgtcagattggggtaatttaaaagccctgtctttgagctctgaagttcttttttctacttgttcaaatctgttgttgagactttccatttctctaagtgtggccttcatttccagaggttgtgattgttttttatttatgctatctgtttcactggagatttttccagtcatatcctgcatcattttttggatttatttaagttagacttcacctttctctggtgcctcattgattagcttaataattgaccttctgaattctgtttctggcaattcagagatttcttcttgaattggatccattgtggtgacttagcatgatcttttggggtattaaagaaccttgttttgtcatattaccagaattgtttttctggttccttctcatttgggtagactatgtcagagggaagatctggggctcaagggcaactgtttagattctttcatcccatggagtactcccttgatttggtgttctcccccttcctctagggatggggcttactgagagccaaacggcagtgattgttatttccgttcttgatctagccaccccacagagataccagactctgggctggtcctggggagtgtctgcacaaagccctgtgatatgatccatcttcaggtctctcagctgtggataccagcacctgctttggtggaggtagcagggtagtgaagtagacttggagagggtccttggttgtatttttgttaagtgtgctggttttgttttggttggcctccagccaggaggtggcactttcaagagctcatcagctgctatagtatagggaggatgcaagcttgccctagggtcaggcagtaggtgtgaagccatagagctcccaagagatgtcctttgtcttgggctaccagggcaggtagacaaagactatcagctaggggcagagtcaggcatgtctgagctgagactctccttgggtgggacttgatgaggctgctgtggggatgggggtgcggttcccaggccaatggagttatgttcccagggggattatggctgcctctgctgcatcacacacatcaccagggaagtggggaaaagctggcagccacaggacttacccagcacccatgtagcctgcagcccaaaaggctggtctcactcccactgtgcacccccaacagcaccaagtttgttcccaagcagccagtgagcagggctgagaacttgcccccagctacaagcttcccagctgagaaagcaagctgactcacagtccctcagctgtcccatggagcctgcagcagcagtcttcctccttcaaaaagtgtggattctcttggctttcctgatatgttcatgtggtagttcttggagcaaaagttcatgtcacgcacgtccgtgtgaagagagttcaccaaacaggctttgtgtgagcaacaaggctgtttatttcacctgggtgcaggtgggctgagtccaaaaaaggagtcagcaaagggtggtgggattatcattagttctcataggtttgggataggcgtacaaagtacattcttaagggctggggggaatattacaaagtaccttcttaagggtgagggagaatatatcgtatcagttagggtggggcaggaacaaatcacaatagtggaatgtcatccgttaaggctattttcacttttgtgcatcttcagttgcttcaggccatctggatgtatacatgcaagtcacaggggatatgatggcttagcttgggctcagaggcctgacaattcacagtatgagtctccacgctgctccatccatctgagtaggagctgcaagttagtcctgcctcctatctgccattttcaacattggtattttgatagggattgcattgaatctatagattgctttgggcaatatggtcattttagttatattattccaatccagtggggcatgggatgttttctattttttttgtgtcaccttcaatttatttattttttttttgagatggagtttgtcacccagactggagtacagtggcacgatctcagctcactacaacctccaccttctgggttcaagcgattctcctgcctcagcctcctgagtagctgggattacagtcacccgccatcatgcccagttaattttttgtattttatgtagagacagggtctcaccatgttggccaggctggtcttgaactcctgacctcaggtgatcagcccacctcggcctcccagtgtgctcccaatgtgctgggattacaggcgttttgtttttcttatagagatctttcacctccttggttaaatttattcccgtgtattttatgtgtgtgtgtgtctgtgtgtctgtgtctgtgtgtgtgtgtatttttttgaggcagggtctcactctgctgcccaggctggagtgcagtggtatgatcatggctcactgcagccttgacttcctgtgctcacatgatccttccacctcatactcccgagtaactgggactgcaagcacgcaccaccacacctggctaacttttttgtgttttttgtagaggtggggtttcaccttgttgctcaggcaggtcttgaatgcctacctcagcctcccaaactgctaggattacaggtgtgagccaccgcacctggccctggtattttatgttttttatgactgttgtaaatgggattggcttttttctttctcatctagatattgttggtatatagaagtgctactgatttttgtacattgattttgtatcctgcaacttgactgaattcatttattaaaatttaagttttttgttagagtcttcagttttttgcagatataagatatgtcatcagcaaagaggaacaatttgacttcctcttttccaatttgtattccttttatttttttctcttgttgattgctctggccttgacttccagtactattttgaatagctgtgaagaaagagggcttcctcatcttgttccagttcttggaggaaagctttcagcttttcccttttcaatatgatgttagctggggaattggtgaggaaatactcatgacagttacagtctttgtttctgcagctggtcatgtagtcgtaactggtattgttgactgccctcttctgctacccattctgttttccctttgccttcagcaagcacctcagcaggttgtggtttttttcctggtggagtgacccaaaccttcattcctgaagggtctggaccatttgtagtcctgcctggattgggctgttgtagtttcccattgaccttaatcacagggcatggtaatactaagagtcgccctaatggattcgctgtattccgtacatactcttccctacctctgttatggagcagtagactgatttcatcttggtagtctgggtcagtcaccccagccaacactgtaactcccttagcctgttgacttaaaggtaggaggagcccaaagtgtccaggtggcaatcttaacttccagtttaattgaatcattgttgtgtctcctgataacagtgttcctccctctggaactaagacctctaggccagcagaacataatgtcgcaggaacaggaagcaaaaatgttgctagtggatcactaggagtgatggtgagtggtgccacttccacttccaccccttgattcctggacccctgaatcctggctatgggagaaacagtaccatatattggatgctgattcagagcatacacggccttctggagaactttgctccggccctgcaaagtgttgtcacctagttggcactgtaattgtaactcaaaaggccattccacccttctatcaatctagctgcttcaggatgatgggaacatggtaagaccagtgagttccatggtaagaccagtgagcccactgccacacgtctttagccataaagtgagtgccttggccagaggcagtgctgtgtggaatactgtgacagtggatgcatgagcccactgccacacttctttagtaagtgccttggtcagaggcagtactgtgtggaagatcttgagtccacagatggtagtcttggcagaagcactgcgtgcaggataggcaaacccatatccagagtaagtgtctgttccagtgaggataaacctctgcccttttcatgatgcaaaaatctgccaccaggtggctggctgatcaccccaaggaatggtgccatatcaagggctcagtgctggtctctgcggctggcaaattgggcactcagcagtggccatagccaggtcatccttggtgagtagaagtccatgttgctgagcccatgcgtaacctccatccttgccaccatggccactttgttcatgggcccattgggtaatgacaggggtggctggggaaagaggctgagtggtgtccacagaacagttcatcctatccacttgattattaaactcctcctctgctgagattacccgttggtgagcactcacatgggatacaaatatcttcacggtttttgaccactcagaggtccatccacatacttcttccccagatttctttgtcaccaattttccagtcatgcttcttccaagtccctgaccatccagccaaaccattggctacagcccatgaatcagtatataatcacacatctggccatttctctttccatgcaaagtgcacaaccagctgcactgcttgaagtgctgcccaccgggaagatttcacctcaccactgtccctcagggatgtcctagaaaggggctgtcgtgcttcagctgtctactttcgggtagtgcctgcatatcgtgcagaaccatctgtgaaccaggccctagtcttctcttcctctgtcaactggatcatagggaactccccatgaggccatcggtgcaggctggggaagagaaggcacagtggtaggagtggagaccatgggcatttgaggcacttcctcacataacttacttgtgccttcaggacctgctcaagcctgatcacgtatataccacttcaatttgatgatgcagtgctgctggtgcatgacccacttgatggctagatgggtcagaaagtacccagttcatgatacgcagttcaggtcgcatcgtgacttgatgacccatggtcaaatgttcagtttccaccaaagcccagtaacaagccaagagctgtctctcaaaaggagagtagttacctgcagattatggcagggccttgctccaaaatcctagatgcctccactgtgattcacctatgggggcctgccaaaggctccaaacagcatccccgtctgccactgacacctcaaataccattgaatctgctaggtcatatggaccaagtggcagagcagcttgtacagcagcctggacctgtgtccgttctggaccccactcaaaactggggtccagtggcctttagggtcacttgataaatgggccagagtaacacacctagataaggaatgtgatgcctccaaaatccacataagcccactaggcattgtgcctctcattgtaggaggggccaaatgcaacaacttatccttcaccttagaaggaatatctcaacagcccccacaccactggacccctagaaattttactggggtagaaggtcccttaattttagtcaggtttatttcccatcctctggcacacaaatatctcaccaataagtccagtgtgtttgctacttcttgctcactggatccaatcagcataatgtcatcagtgtgatggaccagtgtgatatcttgtggaagtgaaaagcaatcaaggtctcactgaataagatcatgacacaaagcaggagagttgatatgcccctggggtaggacagtaaaggtatgttgaaggcaaattgcttggtgggccttataggcaggagtggagaaaaaggaatttgccaagtcggtggttgcataccagataccaggagatgtgttaatatgctcaagcaatgaaaccacatctggtacagcagctacaattggagtcaccacttggttaaacttctgataatccactgtcattccccaagatccatgtgtcttctgcacaggccagatgggagagttgaatggggatgtggtgggaatcaccacccctgcgtctttcaagtccttgatggtggcactaatctctgtaatccctccagggatgtgatattgtttttgatttactatttttctagggagaggcagctctcatggcttccatttggcctttcccaccgtaatagccctcaccctaccagtcagggagccaatgtggggatcctgccagttgctaagtatgtctatgccaattatgcattctggcatcagggaaatgaccacaggatgagcccggagacccactggacccactgcaagtcagacctgagctaaaactccattaattacctgaccaccataaacccctattttaactggaggaccacaatgacattttgggtcccctggaatcatcaccagctcagagccagtgtccagtagtccccaaaatgtctgatcatttccctttccccagtgcaaagttaccctggtaaaaggccagaggtctctctggggaaggatgggagaaggattaacagcataaattgtcggttatgtagtggagtccttcctctagggtacccagcctccccttcattcaaggggttctgggtctataaactggctcaagtttggaaattgattgagggactgtgattctctgtttttgtaactcaaaattagtcttttatccattcgacctagaagttttctgcttatataaatttgaaaactcaggcaattccttttgagtgtagtgcatctcctcatgagtcacactctcatcctcacgtctagggactcgctgggactttagtctagttataggtctagaagcaaacaggggtgttgggggtgggtccagaagagaatcaacatcatcttgcctggcaactgcttcaggggaggccatcgttgttacctcaggcagcacaggctttatctcctcagacaaaagtggaaaggctgatggcaacatggttcagagaggggaagttgcccctactggggatggggaagctgttacttctggcaaaaaaggttcatcagagtttacaaactcagtgtccccagcttcatcagggtcctcccacacgtccccattccaagttgcggggtcccattcttttccaatcaatgtcctccctttaacagtagacacctgttgaggctacgcatgcacctttccttgcgggtcagccattcgcatgataacagcttgtgtctgtttttccacaatttcagctctttccctgcaggagataagactctcactcagggcagtcttagcagatttgagactcagtatctgcttctgaagccaggagatagaatccctgagttcatcattttctttcattactttgtccactgaacttaggagcaaccaaccagcttcattatgttccttggttctccacatatggccaaaggtattatgtatagagtcactaaactcattgtctgtcatgaaagaagaatcaggaatgtcaaatgcatttattttacataactctccagtttatgccaaggactatcagtgttctccatactacaggtagagtccttagcattttggggtctaatcatattaagcagccacctccagaaaccccaaaaccaatgaaagaactccatcttaatattctgttcctctagagccactcttggtaccaaaatctgtattagtcagggttctctagagggacagaattaatagaataaatacatatatataaaggggagtttcttaagcattaactcacacaatcacaaggtcccacaataggccatgggacctgcaggctgaggagcaaggagagccagtctgagttccaaaactgaagaacttggagtccgatgttcaaggacaggaagcatccagcacgggagaggctaggccagtcttgccatttcacatttttctacctgctttatattcgcaggcagctgactagattgtgcccacccagattaagggtgggtctgccttccccagcccactgactcaaatgttaatctcctttggtaacaccctcacagacacacccaggatcaatactttgtatccttcaatccaatcaagttgacactcagtattaaccttcacaatgtttattcatttttcatgtgtaggcatggctagccgacccattttcattttaaaaacatactatacatgtaatgcagaaggccacatctttcttctgctttttctcaacactataaagaaggtagaaaattaatttttctcattctaaacgtcagtgtcttccgctagaatgtttggatacagtaccgaatttaatccttttagctatattacttatcacttttgttttcatgattttaatgttttcaaatattttcttagttttagaatggaatgtattaatatcattgaaaatattattttcaaatttaattcttcttaaaagaagaatttacaaatgattcttctcattctcaggaaggagccatgaggggaaactatcatttcctttcgctttgccccccacttcccattccatcactgaaaaatgaaaagaaattcagaattgcggcttggaatactccatctgttctgaggtcactaagttgtgtttctctcaagggttctaaatcatactccattagtctgcttccaaatatcagccctgagactggagaccccaaaatgggtaataccactgagaaagtaattgcagataagtgatttattttttcctggtctaataaaaccgtgaaggttgaacactaaaattcttaaagcactaaaccaaagctgcataataactaaatgaatagtaggcagtttataaaagagcaagaactagagaagcataagtgatgcatgaagttaaagctgaaaaggactttaaacataatctggtaacaaaattttacagattaagtaaactgagtcttaaagctaaagtgacacaatcagaaatattcagctatttaaggcatttcgagagttgttcgaggttctcccacaatacccactggccctctcagtggatttagtcctgtattaaagtttgttcttctgtgagcactggtcccataaacatgctctaaaccctaaaaagttctgtgattcaacgagtttggggcacatagcatgtagccccttcgagatccactgtgcacactggcattttaaagtccccgaggattattccagcaagacaagctctgttgctttgctcagtccagtgtttgccaaacttacttgagttctggaccgttcttccttgcagcacctatgaatacctatgaaggtgttctggaaaaccttctgggttagggtagatcttgcagcatgtggaaggtaagtgaggtagaatatgagatatgaacatgggaataactacagttttattcagaaagaggaaagatgaagatgcaagactagagacttattaatgtcactagcaaaatagtattattagacaaaaatatcttgttctttaaaacgaatgccaaaagagattggtggttgttacactgatttcctactgctattgttaccaacatcaactttattaaacccagaatgcttaattaaatcattttaccctctgtttgttttccaggacactgtaatttatgatcgactggcagagacgtcaaaatacaaagaaattaccctaaaacatttagagcagtttgctacagaaggtaagtgtaatttggcaataaagcatgattaaaatacaaagaaatcatatacttctgataccttgcaggatccttattattattagacttagagattcctaaagtaagatatcagctgttggcaatttagattttactatatgctgttcccagcctgtgtttttattttactttcctaaaactatatttattaaaattttgagcaactttgtccccacgttttagatggtagggcctataaatgttttacttttagagtggatcatatttaccatttagatacttcactttgtatctcgagcaattcattaggaaaagaagcaagactcaaaaaaaaaaaacagatattctaatctgaataagaaagaagaaataaacctaaactgttaaaatagctattaaatttagtttcaactcaggactttctattaaaaacttacgtaactattaaaattgttattcaatttattacaactcaagacttttttagagagcccctaccacacgccaggctctgtgtgaggcctgagaatccaaaataggataaacaagctttgctctgtctctctgtcctcctgaaatatattatgtgcaaggcaaagcagtacatagtctagagagaggatctaggttagatgaaaggcagcgagggttgttaaacatgagagtcagttactacaagaatttgtagtcttatctcgtacttaacaatggtagttatagctgaatctaaatctccagtctcagttttcactcctatctgtttcagctggaactgttgccagtggcaccaaactgacctaatcaaatactttttcccgttaattcaggcagagaaaagataggaatgttttttaaaacactaggcaaaaacaaaagccaaaacaaaaaaaaagatggcttttgaaaaacctctgtgcagttcttcaaaatgtaaaagcatggaaacatatatattcataggattcagattccataaagcccagcctcagtccttggcaggtgcaacctacccagcatacaacacaggttctttttgttttggaggagagctgagggcatctttctcctctctagatgtgatgttaaagatactcaactcatagattttaatggtttggcccccacctctaccctattctttctgtccctgggctggatgacacttctccccatgactaccctccagtaagttttccagccaagtttccaagagagaaaaacatgtcctaagatggcctcagggatttaagttccactctcagtgatctggcaatacaccaccctttcttggaaggtagagttctctgggaactttgtatgttccttgcttcttacttctgatgtgttcccttaaacacattttgtcttgagatcactaagcctagcatctggtcctagtcattctaagagttaaatgacctggagtgagggcgttgtcttcttgtgaacctagatatctaactgcttccttgggtagctgacaagtgttttggcctctcctttcttccaatgcatctactcttttctggctgagagagatgtgagttacgaaattggcaggcaccagacacagggtgggtcactttacatatcagctttgattgttttcccggggtatatctgctggcagttcttttttgccactatccctcaactatacttagacttttaaactacagatttatgatgacaaagaatagtaataaatgcagtcatatatcctagtaagaggaaggtggctttcccagtagaccccaccagggtctctcttcctttgtaaacatctgtgaggcctctataataagtcagccactatgcttggtactgaagaactctgggtccctgctttccaagtgctttaatagaggagacacacaagaaaaactgtaaaacattgtcactcacgctgtaggagtgttactgcctttggtatctaggtgagaggagggtgcatcaaagagctgattttcagagctgagtcttaaactgcttgcaaggcagacagtgggcagtcgttgggaaaagcagaatggagaaaaagttaccagcatgtgcaaagacccccctatgtgggaagtgaatggcagggaatgagagtgaaggcacctgatgaaacatgtataagccgtgctttggggcttaaattttgtcctggggaaaaattggaagattcgaagcaaagaactgcttgataagattcagattttagaaacgccacactatgcatggaagatggattaaaagggttgggaattagaagcagggtaccaattttaaagaccaggggaacattaatctacattttatactaagtttttgtcataatttaattggacttcatcatattgtttgtatggaatcacttttttcaaaatgggactttgtgaaataaaaacagaaacctcagacttctgaagaaaatctttggtgtgttggggtgatgtatgctatctttttcagggttaagaactttatgttttgctgtggctgagatttcagagagcgactttcaggagtggcgagcagtctatcagcgagcatctacatctgtgcagaacaggctactcaaactcgaagagagttatgagttgattgaaaaggtacgtggatgattctgttgatcatacagagggtttggtttccagatagttttgatctttattcaaggaaccaatggaataaaaatcaaaatatcttgacataccattcactattgaataccctctcatcatctaagcattaacaagtattaatatgcattaaaatattgctgagaagcctttggggttagacattactttgtatagatcttcactcttttcacaattttggatcaaggtttggccagtctggcaatctccttgccaatgtatttcagtttctggatctctgaggatatggaacatgcccctacacacacgcacacattacatacatgacatgtgtgctttgagttaataactataatatgcaatgcaatataaaatagtactgtaatcacacagcttgcatagctgataatatatatgagagtaatccagtgcttacacttgtccagtcattgtgacaaacatatacctgtattatttctgtcgcagctgtaaatgttctcattttacagataaagaaaccattgtgacaaacatatacctgtattatttctgtcacagctgtaaatgtcctcattttacagataaagaaaccaaggctattaagccagaaagtgatggatacattatgatcgatgctgtataaatagcaagaatcttgcttccttaattaagaaaacatttttgtgtagctcttgccgtgtgccaggtgctgttcatagcactttcatctattaatctagtcctcacaacatccctttgaggtgctaattattcctgtcttatagatgaagaatccaaggtaacagagagggtaagtaatttggctgagagtacacagcttctaatagggggagccagaatcctcactcttcctccagtattcatgctctaaatcattcaagtgacttcattctaacctctagcttgccattagataactcttcaatagcactcatgtttgtattgcatagaatcaaactagcctgtccgctgcggtttacttgatcttttctccaggtaagtaaaggctgatactttgttcttctttcctctctatcgaactgtgtacttcgtcgtgcctctgtcttgaaaggtggctggtgccaccagtacctccctggactatttcccccctctgctcctcacgtcccctccctttatgtaatgtggggatgccatgttctagctgcagatggttttctttattgcacaaggttaccatatgcaactcgagatattggtgtcctgtctcctcaacagattatcactttttatggaaggtgattgtttctcatatagcctttgtattttgtaaggggaagatacctaaatataaatataagctcacatatatcatacctgtatatatagagatagatatgtagatatatctagatatctcctccttatatttgaactttttattctgcttacttatgaaaagacatgggatagcatgtatggtgtcttccagcatgatactcccaccctaaatgttataggtatacacacaccaggagacttgttatcagttgacttatttcaatgtctctcttgcctatcttccccacttcttccctccccactccctccaccttctcgctctccatttcctaacatatttatatatgattatgtctttggggcatttatgtagtaaaataaaataatctgaggccataatcacaatctcttttaatctgcccaactaaagtcacatatcttaaagcattagtgctattgatttttaatctttgcttctgttactcttttaagaattaaaaaaaaaaaatccagtttggaaatgatgtttttcctgtctctgaatataaggcagccttgccttgccttataatcctcatgagacagaattaatatgtaatgtcagaataaaaaaatctatttgaaaatggattctaaacatattaaattgtttccacttgaagtacaacttcagttctagagtagaatgtttaatgtacctaatatccttactctctggatgccctagagttttttatagattagattttctaggtttaacagttttgtttcttgttcttttaataactgattaaaagccttgcaacctccagcttttaactgaactagatgttcaacgttttcccagcagatggcgatcatgagctacattaaaatttaagttgactgaggcactccattaaaagtggggagagtgtgtgtatacacatatacacatgcatctatatatgtgtctatatgcatccatgtaaactacatatagtttacagatgacagaaacctcccttatgactgttttttacctaaaataaatgaaaacgggaatttataactaatttgtcttcacttcatagtaagccatgctctctgttgttgaaaatctaagatccggaaagattaagagattgggtcatttactcagccagcctgctccaaatgaagactgattctgtgtccatctctactcctgaaactggagcttcatttggtgatctatttaaataactttcatcaagcagttcatgtttacatgctcatgcacaagcaaatgagactgtggccctctgggtaccacggtctgagcaaattccctaaatgaagaaatcttaaggaacccaaaaaggtggcccacaaatttgacctgaaggaagcttttggagaggtggtaatttttgaaatgggcctccaaggattattttaccagttggaggagagcagacatcattgtagggaaaaagaatagacaaaatagaacagatgtgatggctcacacctgtaatcccagtattttgggagaccaaggtgggaggatcattgagcccaggagtttgagaccagcctgggggaacatagggggagactccatctctgtaaataatttttaaaaattagctggatgtggtagcatgcacctgtggtcccagctactcaggaggcctaaggcagggagaattgcctgagcccaggagactgaggctgctgtgagctgtgaaagtaccactgcactccagcctgggtgacagagtgagaccctgtctcaaggtaaaaataaataaatatataaataacacagggatctttgtgaccaagctgtttttctgaagtgtttccattaactgtgatcataggaggactgtaggatttttaatatagagagccagggttatatcacttctttcttgatctcagattctattctttgttaaaatcagctgggattagggttcagaagttgtgatttactgccattaaaaccactctagtgaggcaagtttcagcgtgtcagaccacagattcttccagaatgttaccctggctttaaattgagcaaatacagtcctagggttcatccattgtcttcttccttacctgctttaactgagacatgctgtttatgcaatctattttttatgtgattggaatctatttttacgtagaccataatattggacttagcatgtcattattggacttagcatgtcagacagtgaatctttaaactgtgagggtcgttttcacatcttttattttttaagaacagaattttccaagcaaacattgcctgaatcataatatatataattgacgaaagcaggactgctttggctggagtaagagtagagaggagatccaaactggctttcccctcagcctccaccttgccctcgtgggtgctccaggcagggcttgttgtgactctgaggatccactaagcacagtttgaaaaccatgtattacatttgtatgtggacttttagaaaacaaattcctcaaaagatcagtacatcattgtgcccgtatgcaagatgtttctgaacatatttgaattgatatgtcattgccacattaatggtagtattatattcacaacattcaaaatgtaaaagatttgtaaagtttttcctaaaataataatttagtacaaaataagaggaaatgttataataggattaaggttatacttttaaatgctgctctctgcctcttgttcctccaatgtttgttcaaactggtaattcagtttttaaaactaagttgaatccttattcctttgggtagtgtaactcctagcataagctgaaaaaaatatccaaatagaccaaaaatatacaacaaggcatttatcctttggttgtgatgcttagttactcaggtatgttactacccagcacactgagcactagaatgtgctgccttcactcttggggaacactatgggaaggaggatatggaaagtgaaaaagcccaccggctattgttatccctattgacagtcatctcgagatgagaggatttaggacttttaaatctatctataaaatataattatcagctctgttccaaaactgtactgtttgagctccaatacttgcattcatatggtaagcttttcaggacatttctaaaaattttaacactgagagttgtttcacgaatcagttgccgacacatctattttgtttattttttcttttgctgttactaaataaatcaagaggtgacattgattagtaggaaggcctaacttgttcaggaataagaaagctcacatggttagaatgcagatgggattatcatatgggatatttcagttgtcttgactcactttgcgaagaattgcaggttcacattgggcattgtggacagtaacacctcttagtctctttttgtcaccacttgagagaatttacagtggtctcattctttagacaacaaacttgacctgttttatctcaccctcgttcttttgaaaggtagtcaacatattaggactcataattttagattgggaaaccacttatagtgtcagcctatattttttaaatcagaatttgttttttttttttttttttgagacggagtctcactctgttgccaggctaaagtgcagtgtcggctcagtgcaacctccgcctcctgggttcaagcgattctcctccctcagcctcctgaatagctgggactacaggcgcccgccaccacacccagccaaatttttgtatttttagtagagacggggtttcaccatgttggccaggatggtctcgatctcctgacctcgtgatccacccccccttggcctcccaaagtgctgggattacaggcctgagccaccgtgcctggcctaaatcaggtttttaaattaaaattttgtatttcctcaagaagaattgtaaataacagaataattatgaagttccttgtttcattggcaggggtttctctgaaatttctcacctttgatctgtcactttaatatatcaggagccagggtgatatcacttctttttggtctgagcttctattctttgttaaaatttgtttacttttattctaacttatttctaagacacataaattatgttttgtctcatattcatactatgctactagattcctttgaaaattaatagtatagaagtctctggtctttcttccttattttataattaaaccattgtttgaaatatgaaggcgtgccttcgtggaatacataattttttgaaaatgtttaatatttatttgcttcaatagaaaaatacaattatgtctttagtactgcatagattacctactaataatttctgtgtttctgaaagtaaatcatttatcttgagaattacagaaaacagcgtaagctataatacctgcctagattcatcactgattaaagcagtatttccctggtgataagatttttatttttctcttattatgatgcgtggattgggaaacttttttttttaatggaaacttatccaatgcttttatctgttcaagtttttctaaaataggttatgggttagaggatcatttctgagcttaagagtaaactcagaacactgtaactctgctgtcaagccttttttgatcagatagcaatgttgtgttttatgtgcattttgtagtttgtgattgatgtatgtcatccactagattgaagtttcacgaaagcagggactgtgtttatcatatttatcactgtgtctccagcgcttgactgactagcctatgttaaccactcaataaatatttgatgaataaatgaattattcatttaaataattaattcagaagttggagcttaataagtacttgcttaatgaaagcctgccccctattaacaaatctagttcatgctttccatgcattgaaggcactggtatcaaatgtgctatcactaaggattaatttaggggtatgttagaaaagaagccaataattttacagaaggcattctttagaagtttagattcgttcatttataaaacctgtcttcaaagttacttgatatataaatgtgagaaaatcatgggttggaaagattcagcaacaaatatctgagcaccgctgcgtggcaggttctgttctaggctctagggctcagcagggagaggatagaagaatttctgccttttgtttcagtggtgggagataggtagtgaacttgtaaactaaaacaatgtcattccagagaggctttagtgccctgggcactgagataaggcactaagataggacagtgaggtagtgatccttttttacattatttcctttacccctccccaaaacgtggttgacatttgggggatggttaaagagtcccttgatgtggcgtaatatagatcaaccattacactcagtgtgactaaacaacaatttagtgccctttgcaacatatggcaacaaatggtttagaggattcctagagaaatataaaacttaatggaaaacaggacttttcttgagcattcatgactgccaagttcacagtaacttctgtattagaatggaatgcttcttcagataaaactaccacatctattcttagtagctgcacatatcactttcatttgtgctaaaaatgaaatgaaaatttacatgatgtatgggtgatttcgtggtttaaaattccagtagtttcctgttctatttgcttaagaacatttatagttagctcatttaattagacctgccactttctgagcatttactaagctccgcaattttcactctttaccctgattatttagttggagggcctctaaagtgagacacaacgtgatccattggggtaagcaagaaaatattagaacttctatttgttttatttcatcttttttagtttttgcattttataatgtgaataatttattaattttaacaatgttttacaaaaatataactgtgtcataagtacgtattcaacattttttcctagtatactcaaaaatgtttgtgagataactggtgtaatttcatctgcagaacatccttattaaatctacgttattaggtttatcttgctgttgtgaaagttgattcttaggtaagttaagttacttgctcagggacccatatccagtggttggcagagcagggatgcaaatccctgttctgtcttaattccagatcccatgctaataatctgtaagttacgttgccaacttgcttttgaagaaagcaagaatgtgtataaaatattggagacttgaaaaataaaatgaaatcaattgtgcagttgcataatcactagatcactcagggtgagaagtggggctcatcagcctgtttgagactcagctacttagtgaggcagcctctatgtactctatgtactgtattccattttccttgaaaacaagatggaaatatgtttttcatgattttccctcaactggccgttagaatcttcttatttaaagtacttaagatttccttagatctctaatcacatgctcctcctttctggtaggataggttccttcttatgaatgcttcgtggtagattttccaccctgggtattgctgtcttctcactcagataagatggatgcgttgtttttgcaagctacacccaatcacctctcacatcctgattcctttcagctgggtgtgtgaattctggccttataactaagcccttggctttgtgagttcaaatgtgatttctatggtttgaaaagcaccaagttaaaatctatttcttggccttagaaaaattaaccagttgaatgatttctccagaagtaggcaaatgagccattccaatggtttaaggacttaatgctcttagtcttagtactgtaggccagaataaagggaaaggaaagaaggtgttaggtctctttaaaacaaggatgatacccagtggaatgcagaacacagaggagcccagcaacctctgagaaccagtgttgtagaatgcctctgagaatcccacagcacatcccaattccagagttaacgtattttaaacctcaagagaatggtgactgcagtagcctcttaatttgtcatgcaggcttcttttgtcctaatccagccccatacagctactagtgacctttctgaaatgtaaatctgatcctgtctctcctcttctaaaattcgccaggtgtcccttgcctttgggattgtcagcataacacacagacctttccatttccattccctgctggcttttccagcctcatcttcctcactgccacacgtcacttcatctatcatttccatactgactgaatggcagcttctcaaacattatgtgtcttttcacacatctgtctttgtacatgtaatttcttctcatttggaatcacctcccttatccttccccacctctccccatttcttggctaaaccttaattcattgtttagtatttaaagtcaagtgtcagctcatgttggatagattttctttgagccatcgagactaagatgatacctcattcctgtgtttatcctttgtactcacataagagtacatgtatagcatgtaacatacaatgtgtataacattttttaagatagggtataacatataacgtgattcttccaggggagcactgtttctctaataatgataatcctgtattacagtttaaaggctttgtagtttgaaactgcaaggaaaagaaagagaattggtacctgagggtctaaggccaggctaagggagaatggtaggagttggacatggggatgtctacggtgatcagacaagatggagccaggtgcaaagatgggatgctcacaagcattctacatcaggagttgcaaactccagttcaagggctaaatccacccactgcctatttgtaaataaagctttactggaacacagctacatccatttgtttacatgttgtctgtaactgttttcatgctaccacagcataattaagttgttgcaacagagaatatatggccctcaaactttacagtattcaccatctgtccttttacagagaaagctagtcagccctgctctagatcagcagttctcatagttacgttctcagaccagcagctttgcaaccactgcacatttccaggcttcaccgtagacctattcaatgaggaattctgggtgtagggcccagcattctgtgttaataagctcctcgggtgattctgaaaattaaagtttgaaaagcaccatctagatttctggcctggtggctaattaattacttgggacttgatgacaaccaggcagtcagggtttaggagaaacaccagtaaggcaaggaggtacagttagaaaacgaggcagccaggaatccaaggagagtttctaatgaagctttctgaaatataaatttcatgcaggaaggaactcactattgtatccccggcacaagtacctgcccagaagcacctgcttggagtatatttgtgaatgaatgcaggcatgcatgtgtgcttgtaaaggagctaatcctgaaatgtgaccctgaggcctgcaggtaggaatagggaaataggtacacctgacgggtgactcaggcctgaggctgaaaccctctcatagaaatgaagtattattgaagaccaagaacagacacaaaagtttaaaaacctgatgatttgaacaaaattctaattttcatctaatctcagttttacatcccatttgcttccttgggtatgtattagttcttggtgttttgtccttacggtcatagcttagctgcacctctagttgaccttagacaatttactcaacctccccaaagctattaactgaattactaaatgtaaagcacttagcagtgcctggtacaatttttctatccgtgaaatgctggtttcctcttcaacatcttcctagtcataatcttatttcatatggaaataaatcctactagtatttatccacatttactccagtggtacaatttggtttaataatattactttgtctttaaggaaatttctgccaaatagcccatgttgtaatctgaagcctaggttgatacgagtttgattattatatctttctcatttagaagcatatcacaaactttaaaaaaaaatgacatcatctaagcactgacataatgtttgctaatatggaaataggtcactttgaggttccattatttagcaaaatatacatgtattggggaaaaatcataatttctaaagctatcataatacattttaccaaactacatgaagctttctgtcctcacttacagtagaaatgttacatttatgtgcctttttaaaaattctgcatacattaggaacatctgaaagagaaaacattactggaggctttactaggtgaataaacattattttatgattttttcagtgataactaaatctatattatgtcaaagagtcatcaacctcaagcctttataacatttagcttggtgacatttagaaagtaaaattagtgtttggagtttttttttgaattccataaatgccatgggaattttatcgcatttcaacacttgctgaatatgtaattcccctagtgcccattagtggccatctgtgtaaggtaatacatatttgggatgaaattgattatagcctaaacactcttgtgttatgatcaggaaaagcacgcaaagttcaaatctttttttctagtgatcattatatagctaacaatattaatttccaaaagcagaacagcccatcactcaagattctgatctcaccataaatgataccagggcaaaaggaaaggagtctgcagaaccttctgctaaaattaaccagtgctgttctcaaggagctcctgggataaagggaaaattaacacgcttatggagtacagtgtttccttcataggcatcaaagtagacccattacaattttgctgaatattccgaaatgttttattattcttcttaaggatttgtgttaaagccaccacaacactccatgttaacctacttgtgtgacttttctcagcataccttgctggccctacatctttgatcctttatgttatttgtgcctgctttgaaaatgtttctcttttacctgtgcaaaactagatgctttccttctttcaaatatgatttcaatgtgatctctccagtgaagtcattttatttttataggtatgtgagtggtaatgtattttatattggtggactttctgagctcatttttccccttagagtagagacagaaaatatacaaaatatttgtttatatgtttctaatgaatgtgttcgtatcttggctcccacattatctagttaccccagtgttttgggaaacatattgcaaaaaaatatttttgcaggaaattttgagggcttgtattaataagctgtccccatgatcactaaaaaaaaaaaccttatgccttgggtaaaatgcttaaaatttgaacacagctatatcctgatcttcactgggatgtgagccagaatgatttaactgcaaatgccctaaaagtagctgaagatttggaagaatcattgtgtaaacatttaaattcaacagttgtggtgctggcatcactgatgctgaattgttcttcctttccttgcttgaacttcttgatgataattgttcatcaggttatggtagatttcaaatctgcttcccattaaaggaaataaaataatgctatcttcttgaaagaaatttaccttcctgtattatatattatacactaagaagtcatgcatcaagtgtgtctaataaccatccatattatttggaatatattgaaaagaaaatggtctagattgcagcagtatttttgtaatttctggattttggtcttgtcattagctcacttagcaaacatactaaatgctgacattcaatgctgtggagtcattaagatgagcaagacgtggtccctaattttgagcaaacctaccatactcatgcatttacacttctcttaatgtacatgaagatgagcaaaattctgtaggagaacagcagaggggaaattttattttaagaaataaaggaaagcttaaaagaaacaataacttttttttttttttttttttttttgagactgtctcgctctgttgcccaggctggagtgcagtggcttgatctcggcttaccgcaagctccgcttcctgggttcatgccattctcctgcctcagcctcccgagtagctgggactacaggtgcctgccaccatgcccggctaattttttgtatttttagtagagacgaggtttcaccgtgttagccaggatggtctcgatctcgtgatccacccgcctaggcctcccaaagtgttgggattacaggcatgagccaccgcgcctggccaagaaacaataacttttgagtttggttttagaggatgaaccaagtttcaccaggcaaggcagtgggggacatgtgtgtgtatctacttagacatacatactcatgtatacaaagacaaatactatgcatgtgcgtgcccatcctgtatggccgctatagcggggactgttgcctggccaatttagcactcattcccatcccccttcttcctcaacagctctactatggagcctggaaaagctaaatacaaatagttggggttagccatgtaaaactatctggccgagtatttggaaatatgctgagggcttttcaaaacactttgcttttcatgtaagagatagatacagttggtatttttgtcttctatatggcctttataattataccttgggacattgggagaggtcaggagaatgagttgaggtatggtcgagctacaaatttaatgtccacaactgcccagttcagtactacgtaagtgaggaaaattaatttatttaagccattgttagatttttctattacttgcagccaaaaagcattccaaactaatgcaggtataaattacatgcatgcatatacacacactttctctctcacttgcatgtttgtatatatagttaactttattgttcatgcctaagcaaagcttgagactaattttagacttcaattttggtgaacaataaggaaaagtagaaaatggctttctttgttatcaccaattctggcttactttcccttgcattcattcccttgcatccattctgccctcacctatattttaaatggaaaaaaaatgaaggcaagagaggagaaaatgattgagaagaaagataaatgctgacgaggatcatgctggaggttgaaacagggcaagactgagaatcagttggttgtggcctgcagagcactgttaagaagggtacccagctagcaacagtgcctagtcatgtgatggaaataaaattttatatcttaatccatcactacattcttatgtatttaggaccaagaacaacattatctgtgtccatttggcaaaccaggtttccctaacagccaagagattgttctctcccgcttaccatctccgtttaggaagatgagagtagaaaccattctttctcatgagagattaaaacagctttggctgggtgtggtgactcatgcctttaatcacaatactttgggaggtcaaggtgggcagatcacttgaggccagcagttcgagaccagcctggctaacatggtgaaaccccgtcttatacgcaaattagcccagtgtggtggcacgtacctataatccaagctactctggaggctgaggcaggagaatcacttggacctgggaggcggaggttatggtgagccaagatggcaccactgtacttcagcctgagcaacagagcaagactccatctcaaaataaataaataataaaaataataacagctttccccagagcccattggttgtgtttggtcttatggtacaagacaatatctaatgagcaagagatctttgagtctgatcttcccctacacaaatgtggaactatgtgaaaaacattcaacttgttcttccttgcagagactaatactatcactttgttgttcttttcctcttggtttctaattgtgtatacatttcctgacactgcttcaaattacaatttaatagtgttaacatgtaacctcactgtttttaaacaggtcagcaagattgcatcttcactatggtagtctcccatagctgtttgtatgtttttttttttttttttttttttttttttagaatgcctgtcctttttaactgacttttttttttttttttttttttttttgagatggagtctcgctctcttgcccaggctggagtgcagtggcacgatctcagctcacctgcaacccctgcctccccagttcaagaggttctcctgcctcagcctcccgagtagctagaattacaggcacacaccaccatgcccagctgctttcttgtatttttagtggagacgtggtttcaccatattggccaggctggtcttgagctcctgaccttaagtgatccgccagccttggcctcccaaagtgctgggattacaggcgtgagccaccgtgcccaggctgtttttaactgactttggattttactccccttctatgcaaatttattttagaatctgttccttaccttaggggttgggttagacagtttcagggagcctcagtgtaatgcctaaagactgcatgaaagtcaaggatatttcagaaaactcaatgggatagttggaatttacaccaaagtccatgaattatcatttagtctctgattttaaaacatatacacacttcaattttttgtttttaaagaatatgaacggatttttaaaacatttctaccactaatttttttcagaatcttcagctacttggagcaacagccattgaggataaattacaagatcaagtgcctgaaaccatagaaacgctaatgaaagcagacatcaaaatctggatccttacaggggacaagcaagaaactgccattaacatcggtaattcacctagttcacattttacatgttggtgctttttaataagttaatgtagttcagaagatggatttgagacatttcaagatctaaaagatttgatatgtcaagattggaatattccaatcttttttcaccattgcatctctgcctcccatccataagtggcacatgtggataacatttctgcagttgtctggagattgggcttatggaagatttatgtattgatacttgattatgtgaccaaaggttattttaagataataggaaagaagaaggttgctaatttgcattcatactatgttaatccccatgttttggaaagagtttataatagctcgggcttccataagagcgtaccacacactgggtggcttaggcaacagaaatttattttcacacagttctagaagctggaagttcaagatcggctgtcctcacgtggctcctcttctgtgtactactccttatgtctcttcctcctaaaacatcagtcctattgcattacagtgctgtcttagtccgttctggctaccataacaaaataccacgagctgggtggcttataaacaacaaatttatatctcatcgttctgaaggctgagaagcccaaggttaaggcaccagcagatttggtgtctgatgaccactggccttctggttcatagatagcaccttcttaactgtgttctcacatggtagaaggggcaaggcagccctctgaggcctcttttataagggcaccagtcctattcatgagctctctgctctcatgacctaatcatctcccaaagaccccacctcctactgtcaccatactagtgactgggtttcagcatatgaatttggggggaacacaaacattcagaccatagcaggcctcacccttatggtctcattgaaacctaattacctccttaaagactatgtccaaatgtagtgtcactggcggttaggagttcagcataggaattgggatgagtggtggtagggagatcaattgagtccctaacagagatcttacacagggaaagttgtttggcattggaagcctgtagtaccagcaatatgccaaaaaagaaaaaaaaagttttttcaccaaatttagtaaaagtaggtagcttgagcactataaaccctgacatggatttatcctcttgatagtaatcatatatattacatacaaaactccacccaagttgaaggaagtattttagaggagttcacagcatgaaaccacattttttagaaagccattttaaaatattgtgtattttttaaaatttagctaacatttattttagaagtattagcagtcagcctaacatatcctgtaaatataaaactctacttcaaatttatagcaaattgatgttattaatagaaaattcagtttattttttaaaaactagtagaactttacaaaccacacaagttgttaattttgattgtaaaaattatcgctgctattagagagaaaatggaaagaatatatatgagaaggaaaataatggtgaaatgcagaacatattgaaattgggagacctaaaaacacaaatatgataaaacagactacaaatagaaaatatatggcaataaagggcagtaaatgtggaaaataggaaaatgtcaagttcaggatatgttcaccattatgaatgttcctatgaaaaaagagtatagtagtggtttctggtaacatttaacatttagaatcttgagccatgattgattcctagaaaaacttagggaagattcacccattcagcataattgtggtatatacagtgccaggtactggttaagtgcaaggaacagagcagggaacgaaagaacccaaaatctctgcccttgtggagctcagatactagtcagagaaacgcacagtaaagtaaattagaaaagcacatagtataatagctatcaatgattgctataaagaaaactaaaatgggagggaaacacagggcattgcacagagggattcagttttaaatagcacagtcaggaagaacttattgagaaggtgacatctgaggaacaacctaaaagaggagagggagcttgtcgcatgatgattagagaaaagctgtcttctgttacagagagaaacagcacaaaaataaaagaaagaatagtagcagaagagatcttcagcatagcagtgtccagggtggacggggcctcccaggccactgtcaggactctgcatttactgcaagtaaacagggacatcacttgatggttctcagcagaggaaagacatgctctgactttcctgtaaaaacagtcactctggctgctaggctgaaaatggactcagagggaagcaagtgtagaatcagggagaccagtgaataggcttattgcattaatccaggggaaatatgatggagacttggaccaaggtggtaacaagggaaagggtaagaagtggttggcttcttgatgtgttttaatggtaagaagttgttaggttcttgatgtgttttaaaggtagagacaacaagattgactgatagatgtagagtatgagagaaagaaatagatcaggtaacttcgaggtttttggccttagcatccgaaggatggaattaccattaacccaaatgatgaaaactgaagggaaagtaggttttcttgatgggggctggaggagtgtggtcaggagcctggtttttgagtaggctgactttgagatgatggaaatgcctacttcctatgtaagtgtctgcggttaagtaagtacttggatatgagagtctggagttcaggaaggagggctgagttgaacataggagtttcaaaatggtcaacatttagatgatacatgaaatcatgagacggaatgagatcacaaaggcagtgtactcacatagtggaattattttaaataggatggtatttttaaaatgtgacatcagcagagttgcctctttagacacagtcggctgtagcaaacaggtacagagtaggccaagttgaattgaacaaagggaggatttttgccctgcagtaagtgcaacaaagcaagagagggtaggaaggtagaggatgtactgattctcccaggaagggagatggtgatgggatcagcggatccaagagacagccacctgcaccttccctaggtgtctagagaagggttctgttattctattttctagaaacaatcgttggcctgtcttttgctcttcatgttggttatcatgaagtgtattacaaatccatttgtcagcttcaggacatcgagaatccttaccaccatctttttccagatgtctttgtagccttaacaggccagatgtacttgttgcatatccctcctatggcaagcaagagcatttcatgtttaacttcctacaaacctggaaaacaactggttgccctcagtcattataaaatcatctttagatattttcatagtacatatcattgttttaacatctttacatattctctggagaaattaattttaatatactctgtgtttggatacaggacactcctgcaaactgttgaagaagaacatgggaatgattgttataaatgaaggctctcttgatgtaagtaaaattatgtatttttaaaactcctttaataatatattcatgctatagtattttatattcagatagctatggaaatattttatctttctgtggttcaaggtaccttatcactgttgttctgttttaacataatgtactctgttttgagtcacattgatgtaaattgattcaagctttacatctgtgacagctaaaagaaattgcaaaatgatttgcgtaatattgtgagacagaaaagttgttttacaaaagcattatgtcaagaggttgctgagtgactgcaacttgctcatatccaagtattctgtatgttaaacattttacatctgctttaacttccagtattcatatatattttacctcttctaaaaaaatgtgaaagctattgaacaacacaaaacaaccattcctagtaggacggactttctttaatgtcctaacatctggaatgaaatgtaaatccctaggatgtcttttttcatggctgtgatcacttgatgttttatttgggaaatgaggaaagatttgttaggaatacagtgtaaaatagttagcaaaataatatgtaggtcaagtgacctgttaatattaaagtaaaggagactatttgttattttaggtggaagacagagccgtagaggtgattatacaacttcttaaaatagtcattatgacgcaaagaacagagaaaaccttggtaattagggatgttgacgaagctgagaggccacatgcgtggaagggatggtgaagaaatgactgcagaagggatggtgttgatgtctttgtcagtaacatgggttacaggtggtgcacagtttttcttaatacctgaaggaaatcagagctgtctctgtgatgcagaagcaaaagcagggcaagccacgcgtcatttgatctggtatcctttctgtctggctttgggcatttaccttccgtagcgtatggtagccttgcttcttttgtcttattcttgccatcatctttctccagttcttggataagcatgttctttaaatgttttaagtatcaagcagagaatagtaatctcaagaaagagaagtgaaatatcaaaaatattcattgtgttgtaccagtgtattgttaagacactggcatttattttcatttttgaggtttctaagatggtaactcaaaattaataaacacttcaaaggtacttggactgcctgtttctaccagagcaaacattggtaggagtctcaagttgaatactaaatttcagtaaaagcaggaactatgtctgtcttttctggtttatcattctttttcagtgccctgcaaatggcctagcacatagtaagtacactataaatatttgagaagtgagtcactgagtaatttttaattaagggcttcttttttgaaaaaaaaaaagtatatcagttttaaatttggttgttgttgatcatatctgatattttttaagtaaagtggctaaaagtctccttagcagttcgagtagcagtttaaagatcacaggcaaacactgtggctgaatggattaacactaatttgtccagctccagactgccaggcattctaacactgctgtctggggaaggcttttctcccagggagttaagtggtgactttacaaatctgactgtttagggtcagacctgctgcagtgtactcatttgtttctcagcaggaaaggaaacatcacttcgcgtagctccttccgatcttgtgtcataaaacccatggctgagatttcaggcaaatcattagatgtgctagagtgcctgtaggtaaatcattattttttcgttgatatggaaatggaacgcatccaatctgtgttcaaattgtactgatcagtagtgaatagaattattttatcagcacaaagaataattagcatttaagtaatgaacttaggaatataatgtcttaggaaatgtgaatgtgtgttttgtcaagtgacaattttaatgagtgcactcaaatcattctgtgaaatagcacagggtgaagagcacagttctgtcccaatctgactgtgggaccgtcagcaaattaaaatcagcttctctgagccagttctgctgcctacaaagtaaggagaatgtaacctttggcataggattagcatagttagcacagtacatggcacatgtaaaaaatgagatgttataaaattttgtagagagaatattatttcagtagcttgtaagttgttttgcatagtgatcatttttgttataagaaaatactatttcctcatcttttacttttttccctaaggtggcaagttacaactgtaggttctctttcacataagtgatacatattgagcatttttctgttcagattttctactaaaatattgttcctaaagctgataaaatccaaaagctgaatctttttcttgtgttgaacttctataatgtatcatatttgaagctcttaaaatttcagatagaaaaccctttctcctagtgattatgataatagaaatctttgtcttccataatctagatcaccaccgaagaaattccactgggctttctaattttttctttttgagtttcaatatgagtatccttcttaaaaaaaataactcttcagcatttttaataaaaacatttaaataaatacataagaccaaactacagttgaaaatacaatcataatggaagtctcactctacagacctgatagggaaacctgacaggtctttctgccttggttcattcttgactcctttcatagcaagagcagcagccccggctagaatgtcgtccaaaagcaaagccaggtgttctcacccagttacccaccaggctcttgtaaaattgccaggatcagcagaaagcttgattttttttttctttttagaaaaaaatttcatggataaatgtaattaagaatcatgtaaagttgatcaaaacctattaggtatttctgataaataattttttaaatttgaataactttctatagtgctgctgtgaactactttactaggagttctgattgtgttctcaatatgagatttctgtttttgttttgttttgttttgttttgttttgttttgttttgttttgtttttgagaccgagtctcgctgtgtcacccaggctggagtgcagtggcacgatctcggctcaccgcaacctccgccttctgggttcaagcgattctcctgactcagcctcccgagtagctgggatcacaggcattcaccaccacacccagctaatttttgtatttttagtagagatggggtttcaccatgttggccaggctggtcttgaactcctgacctcaactgatccacccagctcggcctcccaaagtgttgggattacaggcatgagccactgcgcccagccaagacatttctttaagcatctgcaaaggcagaaatttcaaaatactgatttgaaaggggaatattttacttctctaactccacagcaatgcccaggaaatgtcccacagacttctaattaatgataaacccttatacctagtgatacttttgcatctcttttatatcgtttagtttgttttaattttttaaagtctgtctgttaaatctggaaacatctagaatgtgagctaagcactagagaatctcatactgtggcccatctttggctcccagtttctaattaaactctttcgaaatgcactgaaacagttctggaaggattgggtttatgcgatattatttatatcctccatggcacatcaactccaaatctctggaaatactttcaggcaacctaacatattatatttttgtataggtttggtctaagtttcctcttgtgggagaaaaattttgaagacatgtttcattgagatagctcaggatttcaccacaatttcatctaaatctagagtgggtgggaggggccatcattttttaagccattaactgtgtgacttaaacagattttttagaggtatcaaaattgactgtcttgagtctctcgtgatatacccttaaccttgatctctccttctggcatctcttttatgtgaggagttgtgggatctgtccccagaggtagagctacatctcaaatccattttttctatttttcatcctcctttctgtactgccaggctttcctagaaaacaaaagtggggtagaaagggaaaatatacactatacatttattaaatcaacaggcatgatgtttggagacataaatttcctaccctcaaaagcttgcagtcagtgttcccaagcttaactcctgagaagccctgccacctctccttctgatcatcctggcagtttttctagattgtctctgctgttgttgatgttcaccttcagcctgatcaggagccaccacctaatgtatgagaagtagtgtttggatcctgcaggaaaatgcagctttctgtgtattttgtaccaggtactagattgaggactttatagggacaatcacatttatacctgaaactattaatttatatgttataagtagatactagtatgcccattttacagataaagaatctagaaggataactggaccaagctcaggtagctcggcggcactgggggatacatctaaggaatttgattccagagtgtgggaagcaaataggtttttctagccttcatctactacatttgtaaaacaagaataatgaaaatgtccatctcatttaggggtggagttgtgaggattaaatacaacaatacctgttaagtacttagaaacaatgctggacatcatcatcatttttttttttagtattattatttctagaggagagttcttcactgctgtccgatgtaacagatgactttgaacagccattctactcttaaattacttaaagttctctacttaatttgagaatatgaccccaaaccagctgtaggtttgattatggataccagtgtttcacttcacttacatattttacagaaaatgaattgttagccacattggatattaagttaacaagcattagaatatatatttttcaacactgtggtaaaagaaaacccttcatggaattgctaacttttttctagctgaatttgacattctaacaccatgtaagttttgactataacttataggacattcaggacataaaggctgaagttgtcatctgtacccttttaagctcaacttacatgtattatgcggacagacctcactgttttgggaacgggccactgttgaatggcttctgaaagaaatccagaataagcaagttattgactcaactccagaaaagaagggaaaaaagagaatttgggctacttcaggttttgttttgatatgtcccatgagtctcatacaatatattttgtattgctttgaaaatagtttaggcaagttttaaaccacactgagttttcctccactgccagcattggtgcttcagtactgtgaattttcttttaccattagcaaagctgtttcagctttttggcttgaaattttaagatcaaagtttaactttgaaggtgttaatgtatccctatcagaagcaaagatatttttttataatgtcctaatgcaaaaagattgttcgaatattgtctggcacactgcttactccaagtagctctcagtaaagaaagccaactttgttacatttgaaataaatgggttagtaaaaagtgtaaacattaccaaaaaatgaaaataacatatgaacaaataatctgttctccttttcctggatttaagacagtgtctgctgcaagccaaagtacgtggttgaaaaagttccatcaaacccattgtctgggctcatagaattaaatgtgtcctttttttttaaacaaaattcagcgaggctggcttgtgctgagaaccttaagtgaggttgttcacaaatttatagtgtgtctgttttgagaagttcttccacccctcaaccctgaatattctttgcctcatttttggctaaatttctgaactcttccaagagctccctgagacctagaattgcagataaatgctttctaactagtctgcccccttgccattctcccccacaagtttgttgacatttctgagaggcgcacgccatgcctcgtgccctctttgcatctctgccaccaataccttctgatgagtcagcacacgcataaaatgacagtttttaggaaacctactatgtgccagtacgcctggtgtatctgtaatctgtgctcctttagagctggtggtgtttgtctcagttccagatagagactttgagttcccatgtctagcaagtgctggaatcttaaatgtgaaccttgattgcttgaagtcccaaactgtttttgtttgattttggttttaaataaccgtaccttctccagtggcagcagtaactcatttgcagaaagaaatattccagcagctatctcccaaacttattaacttgtttcattttcattctccatccaacacttatccccctttcccattttcctacctcctttaccactcaccaccaggaccacagaacccctgaaagagggagactcttctggaatatgacaatgcccaaatcttgtgattatggaattctgaaaagacctcatatttaattttgctaatacaactgtacataagatgttattgactgtgtgtgtgtgtatatatatgtacgtatatatgtgtgggggggggtatatgtgcatatatgtgtatgtgtatatatgtgcgtatatatatgtgtgtatatgtgtgtatatatctatataaaataatggaaattgtgtgcgtttgggatttgcactgagaaaatatggcagatcatgattcttctattttcttacattaattaatttaaattatttagaaaatgggcccaacattagctttctctgtggttctgggtaacaatttctcacaggccctagttgttaccttctccaaactgttgatttgtaatttgcttattttgagaaagccagttgtgtattctgagcagcctcttcctggctgaattgaaggtaatgagagagactggatgtctgcctacccagttcctccccgcgtgctttgcttctgcattcactgctgccactggagaatatttaataccaaagtcaaaataagtgtttaggaggctttcagtggtggtttaaaataattaccatgggggctttggtaaaagcctttatccagaaaactctttaaattatataattatatcccttatcccactcttccttcctttccctggatttgtctgtctttgctacatgtccccacccccgtgctgaaacacagactggacacagattcagcactttgctgcctctctctgcattgtaccctaagtgagactagatgcctcgcaagcacttatttgcctgatggaacctatcataatcccaaatctcaaacctctgttgaggggccaagagcaatttacccagcactacaacttcctcttcctacctgcctccattttgtgacccttgacctttgtcagatggcatgacccttctgggagattggaccacttcctcaattacagtattccatatctacccccgtcctgggaaacctatatttgtgtattagcaaagcatggaattttttttctcttttcctctccccattatctttagcaatatatattgattaaatgcgttcgttgggccgccttcctctaagctgtttggaggacctctttgaccatgtgtttttaatgacttcaccttctgtctgccttacccgttttggaaaaattactttatattggtttgattctatacacatatgtttttcaacattatgttctagtacaggctacgagtttggaaacaccaaagctttttgatcaaaaactacatcaaaaaaaaaaaaccaataaatacaattttttaaaataagttttgattttataatgtgtcagggggttgcaggggaaccacgtcaaagagagctagtgatcctgactgggatgaatactaaatgggccagttgtacataaatgtagtttctccctactctcaggcatacgttcttttactaccacctgcagtagctggaggagtattgatatatgtgttgcgtaggagtatatggaatgcccagtgttccactgaatcaataacacattgtagaaaagcaagtaatacccaatggtttatccatatgttattatgggagccataactcactctttaagaacgtgctaacattgtccatacttgatatggtcataatgtattattaagaatgtttctagaatgttccgttaattcataattttaaagtgtgaacatttggagagtgtaagagtagagacagaatgaaacatgatttgaccataaatttgtaaatacctcacgtcttaaatgatgatgaggtggagcctcaaaccaccaaaacagctaataaaatatgtgttagtttaagattcttatatatatcctcttatttgacattttaaattaatttatagtagattttaaaaggtagagccttagcaaactaaagtaaggtgctggtggtgtttttgttttttactcccagtaaacatttatttctctgctttaaaaacaaaacctaagaatgaactcagtggtgttgtgtctgaagaacatgtcagcaaaacaaaccctgggtgtcgtctttataattaattattttaaaccaaatacatacattgatgtggtcacctatgcagaactatacagataataaaagagaaatgccacatcagtttataactttccaattattttcagttaagaattctatcaggttggagacagaaattaagagagaaaatcagtggttagttatataaatatttgtcctcctaccatgtaccaagagctatatgtcacatgagactagataatgccatctttcctagattgagaagacaggtttccagaagtagctgatagtattgaatgttggcagtcaaaaggtaaattgaaataaaattgccattgggagatttcataagaaaacttaaaattatcccagtcacatgagatggagtctcactctgtcgcccagtctggagtgcagtggcgtgatctcggctcactgcaaccttcacctcccaggttcaagcgattctcgtgccttagcttcccaagtagctgggattacaggcacctgtcatgtcatatccagttaatttttgtatttttagtacagacagagtttcaccatattggccaggctggtgtcgaactcctgacctcaggtgatccacccgcctcggcctcccaaagtgctgggattacagacatgagccaccaagcctgacctcttttttttttttttttttttttttttgtggcatgatcttggctcactgcaacctctgcctcctgggttcaagaaattctcctgcctcagcctcctgagtagctgggattacagacatgtgccaccacacccggctaatttttttgttttagtagagaaggggtttcaccatgttggccaggctggtctcaaactcctgacctcaagtgatctgccttcctcggcctcccaaagtattgggattacaggtgggagccaccggacctggcgcgtttcgtgttagtacctttgttagacctgataccagaggaagggcagaactaacctttcctggatgtcacttcatgccaggcactggacagggcactttattcacaaataaaggagttagcacatcttatcactataatctctctacaaaatagatagtaacccaatcttatgaatgagaaaaatgtgattcagagaagttaagtcacctgcctgaggaaagacagccagtacgcggcagagcaaggattcggaggaaacctttccaataccacacagttggccttctagagtcagtcaaaccaaaaaaattacattaaatcatgaggaggtacattgaaatacatacataactctggcgaagagtttatgataggccatgaaatgaatttacccataatactttttgatatgtgtgatataatcctttgtagaactctaagctcacgtagctgcccaagatccaaaagggttttggagttcttgctgtcttaagtaagtggttgaaactatttattatttcctgtttaacttttatcattcattagggaatttttttcaaaataacatttaattttcccttttccaagaaggtgaataatgtttgattagtttatctttaccatactgtacatccacctgaagttgacgaaaacctggagttctgagccatagggtatgtttcgacctttggaacttagttctttacagtgtgacgtcattttattttcaaatgttatcagtgtccagagccattgtatgcaccctcacgggccagcctggactttctcacatctcacttttttatgactgcacgtttgtatgatacaggcagaccactgctttctctacactctggtaattcgcatgtgtctgctgaccagctatgaagagttgtgtcacagtggctctgcctccagttacctcgtttcagtagagtcaccatctttgttcagcaagatttctgaaggtgttttaataacattctgttgcattttttcctttctaaggaagggaagtaaaaacagaaacttgtgttgctgatactgtagagggaagcacaggcttcctgaacttatgttcattctgacaaaggtgaaagttgtatatcttccaaaagtgatttgttgttagttccgatcatatgcttatttgtttaactggtggtgaactcatgaagaaaaataacaaatccaagaataacgaaattgtcttagttcattcaggctaacaaaagtaccatagactgtggggcttaaacaccaagtctgtttcccacatttctggagaccaaggaattcaagatcaaggtggcagcagatttggtgtctcttgagagccttcttcctggttcatagacagtgtcttcttgtgtctgtgcatgatggaagaagaagggagccctccagaaatgctttaaggaccctaatcccattcatgaggtctccaccctcacgacctaatcacttccaaagaccctacctcttaacgccatcaaaataggagttaggatttcaacatatgaattttggtgggatacagaccctcattccataatagaaatacattattaaatgatgtatctgaaactcaaagtataatgcagaattttgatttttttttcctttctgggaatagaatcctccttgtaacataagtttatcatttgacctgcacacatttaacagattcctaagaataagtatagatgctggatacttgtttttgtttggacctaaatgccaaagtatactttagataagtatagacaggctttttccttttacttttttgtttggggttagtcttactgatagacaccctctgggacatatatgagagagcacatgttatttactgaagccacaaataagtaattgcagcctcagagcaagatctggaagccactaccattagctgcttcatgtcggactatttacccataattttcacctcgtctctgctctgtgaacccctggctaacgagtcatggagtcaaattctagaggctatgcttttcctttccttagggatgtttccacattctctactagggtgttgcttggatttgttcctgagtaatactgtctttcctgtaaacctcggctagaaagctgaaaaggaccatttttatgcaggtgctttctgcagcattactttaggggccatcaaaaacacagtccttaggtggcctcacatgttctttgcacatctggcctgtgggttcgttagcttgttccaagcagagttttgccaaaatgaaaatgacaacttgcatgctatgatactttccaaacaaatcagggcttttaatttatttcactatgaaactgtgtcagatttcattgtctagggcaccctcacatctcacttttttatgactgcacgtttatgatataggcctgtttttttatcaagggtttttatcaagggtttcctcaatattaatgaaaaagattgccataaagctgctagtctctaatttctcaaagattgctgttacattattttattagagtttattatatgaacatattacctgtttgggaaggttatatcttaatgattcaaagtgaggaattctacttggcctcattatctgccaagcatgtttctttatttttatttcccaagcatgtttcttgtaaaccaaataaatattatttctccttggcccactgttttacaaccaaggttgatgactaagtagctgatctaaatatacattgtattacattcactagacaatttaaaatatttgaggccaaagtagatactagatcatgactacctctttttcattttctctatgagataagcacattagcattttctttattctaaatcagagtatttaagagtatacaggagttttacaggcagcagacaacaatccttaaaatggtcacacaagaaaaccactttaacttcctataagatattctccaatcattaataatttggttattctgttattaccttttcatcaaagacctctgttccaaagggaatatagacatataaatagataagctactcaacatcatgctaccttgtataagtatactgtaaatgaagtatttcagggatccaaaagatagaggtattgatgtcacctggaggactcagggaaagtagggtcaagggaatgtgtcttggtttatttgttcattatttttagaataagaaaattgtgaccttttaggtaggcttaaaggaaaaggaaatagtgccaatggggagaatgaagatgcaaagagaagtgaaagaaacaaaaggtgagaaggcaggtgttaccccagctcaagaactagaggggattaggtaaagggaagttttgaggttaaggaaggaaagttgagggaattctttctgctataaatgtataaatgttctcagtaaaacaggccgatgtttgccgaagtgacaggggccaaatttggactcttgaggagagaagaaaaggtctggagtagcctctgggaaacatggaatccactagacatggataaaagactagaccagcagtgatgagcagccacataagaagagggagctggagtagatcctgccctcgcagtgaggtggctttttcctttctgtgttaacgagacagaacctagaggttgtgttgggtgtggcctaaatggtgaatttgcaaggcaagaaagcatagtaggaggttcaggctaagggcttccagtgagcactgggctctgtctgtgtggtgctgtgggtatgggaagagcagagcagaatggttgtccagaatgaccacacaggctgcaggtcagggaaggggcacgagaatctcactttccactgtggctccctcccttgcctggctgagtgtttgaaccccagcctttcctcttacctgtccatctccccagattgcctttaccttgcaatgtctctgatgctcctggactttcagcccacgagtgaaaatatgcagaacaaggaaatagagatcttttatttcattgagcctgtggtctttgatcctttttctgatttagcttctcattgctatattttcacttttacaagtcactaagtttcaatatttaaaaatttcccccttcagtagccaaaaaaacaaaacaacagctaatatagtaataaatttatccttagctacaggagataagcttcaatgcaatgcagccataaagtatggctcctggacttaggggagaagcaataaagtttcataaataaaagaatttgaaaatactcccggcagtaaataaggataaaatataacttgtaactggcagcacacagctaacaacagagcttacaaaagaaaactataaactaaaatgagaaaatgtttgcagctttttttgttgttgttaccttgcaccctaggtgggctgacgagtgaattcactgtgagaagtttttgactcaccttctgaaatgttatttctatcacatctcttgacaccttctgatttgccagagatctgtgatagtcaccaacaaaacctagggatactgatgtcacgaatttagagaattttcaataaattttaaggtgttagagaatgccttataaaggagggagagcggggaccacaggactgcataccctatgttggttcatgagggcgtttcacagttctggggtttacttgactttcggtcttgttttgcagctgagctttcaagaaattcgaagtcctcctgaggtccgtctcaggtttcatttcaggttttcagctcagaaatcacttgggcaatagcttaaaagaaaatacagaggctttttagtgagcaatgcctttgtttgaaagtctgttaaagtaatggattatttgttccctggaaaattagggagcaaagagaagacctctctctgtgtgtgtctctctcttactctctctctttctctaatcagaagtgataataaagggggaaatggagcattgccaacgggatgaaatcagaatttatcaatgctctcattcaataaatatgtatttcatgagcatctgtaattgcagacactgcctttgttgctgggaaacaggtttaacgcggtctttcctgtcaagaaactcagggttttgctgcagtagaatgagttacacttggtagcgtggactgaacctgggagggcttacagggtaagcttggtttttgaaggcagcagatgatcctctggagaggaggacattccaggaagagggaaacaaaagaaaccaagattgtgaagggcactgggaaggaaagttaggctcagaatgtaggaagccttacatgccattttaaggagtttagactttattgtgtcagctgtagaaagccctagaaaatttttaaagcaagaagagacaagatttgtgttttaaatttgttttataaagagatgtctctgttggtggtaaagacaagatgagagacagatgatgagggctcaagggaagcaacagagggactggtgtgggcattccatttctaacttgctgcgcctggtactgtctgaagtttggtttgttgtttttttttttgctggattgcatagaaaaagacaggctaccgcagaaatttcattctcactttgatgtcactacttaatagccacatatttttaagcaaggaactgaaacactctcatctgcagaatggagataacagtagtgcctcctgctcaggatggtagcaagtgttaacttaaatgctgcatctctgtgttgcatctcagaactgtgcttagtgtgtagtatgtgctaaatattttgtatcagttcattgacttatttgttcatttaatctatatgaatttgctgttaagataatccaggggatatctattatagattgtcattagtaaattttgcttgtggaatttattaccaacatttttcacttctttaagtcctcttgggccaaaaatttccagcaggaaacaggagggtgaggcttgtaaattaaaacagctactctccccccatccctgatgtaaagtgtgaacagaaaattttgcaaagaatgctgctatatggtggtcctttgtgtcactgtgtgtaatggggaacagggcaactgttaagtgaagcttcagcattaggaaagttgggcagtctttctttatagtacaacttggttctattattttggtaaaaggattctgatattccagaacatagtgtgaaccgcatttgcatacaaatgtaaaaacactttcaaaaatccccaacataaaattttaattacctatgcctttgcttctctgtgaaataactacaaaatgaccatatatatataaaacgacatgcttaaattggaacaataattgtaaatcccatgaacataataaaaattgttatataagtgtactgtatttttattgtaggtatattttattatataaatatgtatatttgtatttattttataaataactgtaggcttagcactcagaacagaaatctgataggaggggaattactcattatatttccttgtgccaggccagtgttgtgtttcttcaccacggtagggctcttgtgaaataggaaattggctccattaggttataggaagaatctataggatgtggggagaaaaactaaatgtattgaaactttatccctttgaagagctgggaaagcagttcttgacaaagggagacaaatagttgaggtgaacaaagctgtcttgacactaaaggcttttattgtccctgaaagtgaactcttcattgatagaaggcgttcttttatttgatccatcaagattaccaagtcacaggtcaccatccccaactaaatacaacatcatgaaatcatgattaaaattacaaaagccagttcataaaagaggcaagagtttacagattgtgcatttcctcctcttagttactaggagttaaattcaatagcattgaggatttttgaaagaatgcctgtaaattatttaaattacagtttgcttaatgaaatgatacattctgagaaacatgacattaggcaattttgtcattgtatgaacatcatagagggtacttgcacaaacctagatggcatagcctattccagactcaggctacacaagatagcctattgctcctaggctacaagcccttatagcctgttattgtactgaatactgtaggcggttgtaacacagtggtatttgtatatctaaacacagaaaaggcacagtaaaaatatggtctcacaatcttatgggcccaccatgggatattcagtctgttgaccaaaacatagttaagtgatgcatatattccccaacttcttcccttcattcatggagtagcaactttgactagctcataaattaacacgatttttaacaaaagaatttactgaaaatatgtttgccgtattgtgattgcatggtcgtgtaaaaagtaaagtagaggttcctcttcaaagactttcctccccgtctaattaggaataaatagtaatttctcttaaaagcaaaatttattcaaagacctgtgctagccataataaagaaatcaatgtactttatgttcctagctcccacaatttagcctaaatatttgccccgacatgcttatactggtccaagcaagattaggtcatagcctgttcctcttccttatttaaaagtgtttttacctttctcagcattccacaagttacttccgccttcctttgttctcctttacctttgcctcttttaaaaggttctaagttgctagccaatcgggacaaatacagaatgtgaggtcccattccagccaatggaaaccggacacagcggtggggtgaacgcgtcaggttataaatgaccctgtctcctttgttcagtgtactctcgtggcaaaactgctggcgagtgtaccctttctgcaaaaagtaaaaatggccttactaaataaattaaatttatgttcaagtgctatttctttacagcaccggggaacaagcatttcaaacaatgatggttagaataatgagcaaagactacagaatcacctgagaaacaggtgacttatagtctagtcccaaccctgctaggaacagatgtgtgacttcaatcaagtaactaactttttctgataacaattgtgcaggctcctgaggggctagtaagaatcaaatgactgaaagtatgtgaaagcaatttgaaacataaaaagcactaaaaataactaaatgtagttgccaaatatccttaaggcatcctagtagaacaaatgggagtaaatgttgatggcatttttgcttgtttaatattccagggaacaagggaaactctcagtcgtcactgtactacccttggtgatgctctccggaaagagaatgattttgctcttataattgatgggaaaaccctcaaatatgccttaacctttggagtacgacagtatttcctggacttagctttgtcatgcaaagctgtcatttgctgtcggtaagttctccttatcattgtcagattttagtaaagaatgacttgatctaagttcttgatttataaacgtcaatgaaagtaatccagagtttacaaaagttaggttacttactaatgtgttcactcaagacttgaggttcacaaactgggatggaatttgttagttttaaaaagtgagtcctaacaatcattaacaagtatttttcctcatttgaatcgacaggtttcttgccattatctttgtttaaaattcattatctacctgcatttccacctaggtcctttctttaaaggtcctgttgtctatatttaaatctttgatccagctgctaagacttattttgggggaatagcatgatgaaagatgcaaactgaatcattttccaaatagctgggcatttttctgagaggtatttattgactatacattcctttgccctctaatttataaaattgcctatatcctaaattaaaatctcttttgagttatcaaggcctaattcatagaaaggcatttttgtaaacgacatagctccagtccttcctgagtttcttgtcaaggaatcttccccatatttacgtataaattgtttaaactccgtcttcctaagacctaaagtaggttcatgaatatgatgaatatgcccagtctcctcttttgtgatcaccatgaaaactaaggatttcccctttgtcattcactattgaatcttaggagttgatcagtctagatcctgggtagcaatttctcaaattgccttctcttcctgggacataaaatgttagcagagattctgaaagatttctcagtatctgtgcttttggtattatctttaaaactattctatgtgcttttatcgttttctttaaaaagacatttactaataaagttatgctttttatacctcttttgtctgggtttattcacttaaatattttgtatatggtattatttatgaattataagctataccttatagacatttcctaaatttcagttgagacatactttctgaaatataatttaaactattctcaatatcctttataagcatcattttagcctataaaattataccatattcagagaattaagagttgcttatctttcccaggagtctaattattttagtcatataatttctttttcttttctgtggtatgtattaacaaataatattactataaagttcttggacaatatattgtacagatgtttaatattagtcatccggctctttgcttaatcataaagagactggaaattattttgactcatttttactttggtattctcatgctttttaaaatttacttttacagtgattttgctggattccttgcaaatgtcttgactaagtgtgactaatgttcaactttgacacttttcatcagaataatgtggcagatttggtcacttaatcactttaactaatgggatcataaggatcaacaaaagattgctcaaaagcacaagtgttatgattgctggctcctagttggaaacaacatgaaacagaatacagaagtattaagataaaatggccagttccctagagtcatctgttatgtgcctactttgtgtgtgctgggcgcagtgcgacacataaaagatgagtaacacttgatacctgctctccttcatgtatctttctttctaagtcaaatcacagtttggttggaaagatgtgggaggccaattttcatattgcagtgattgcagctgagcctcattcttaaagcattgcttaacacagtacctcccaccattcttcaaaaagtcgaaccacaaaattaaacaatagcagagggagagaaaaaactagaaagcagagtcaagggagaaaaaatatgttctgtgcttgtgaaattccctcccgaaatccttgttctggatgctcacaagtcacatggacctctgggcttctccaggcaccaggtccctagaagggaatcacaccctgccgtgcacgtgcggctcagctctgaaactgagcttataaagatgtgtgtggccccttcctccctcggttctgttttatgcatgtttcaagaccatgaggtccctacgcagacactgagttttatttccagttttaaggttttttttttttttttcttaagtcacatatctttcctcagcttttttcttctaactaccttcatactctctcttttcccataaggactgtggttcagcttctggcatgtttgagaattggtctaagcccataattacatcagtgccactgccggatttatgtctgtgcaccttcttggcctggtgcctcttggcatttaaactattggcacagaccatcttcttgtcattttgcttactgacctcagaatataatttccatgataatgcttctatccctggataggaataggtgggccattctgtgtatcattctttccaattaaacccaagtgtcactcctcgtttctcagatgattacaatctcccggcctcaggaaattctctattttactccattagaagatagacgctccagataaatactgattattatttctaaatacagtttggtactgtttcccaaattcgtttatgttcatactggctttatgggcttttctctcaaatttaaactattttccaatctactgcttgtcattccacacacatgcagataattcagaatctgatcttcctctgcagtcttctctttagccctaggtggagtggaagtagaggggaaagccttcctataacagataatgagtctccatgttagttccatcatcaggattgcatcagccactttcttcccagatactatcagcatacagggcagaatgaggcagattttagtgtttgcctcattgacacagttataaagatgagtgttgtccctccagagtcttcagctgaattgaaagaaacagttgttcccaggcagcagacattatgtctctctcaccactgttttctgaaggaaattttcagagacagaactaatccccccaccccaaatttattcagggctctggagtcctggtggttttggtttctaaagtataggttgaatgttgtgcctcaaatatttttcttaagtatataaaacccaagaagtggaatgaaacctgtttgtatcagtctaacagcactgtattttcttttcttttttttttttgtttgtttgtttgtttgtttttttgtttttggagacagaatctcactctgtcacccagggtggagagtgcagtggcgcgatctcagctcactgcaacccccacctcctgggttcaagcgattcttgtgcctcagctcccgagtagctggaattacaggcatgtaccaccatgcccagctaattttttgtatttttagtagagcctggcttttgccacgttgcccaggttgatctcaaactcctgagttcaggcagtccacacactcggcctcccaaagtgctgggattacagacatgagccaccgcacctggccaactactgttctttcatagatactgtgcagcttctgtttttaacattgtgagtatttacctgcataacctgaatgcatctaatttatagatagtttctgattcattttcccagttataaactgctcctttatggttcttcttcccctctactccctcacacaagtccactgattctcatgatttggtgtgatcacggatacttttggagaataaatgaaagttatagaccattccttccagaagaagtacacatgcacacaaacatgtaaaatttcatgaagcccttcaggggttttacagactcactgaaactccttggagaggtagacgtagggaaaaaagcttgttctaagactcatggagatttatggatacagctgaaatcaagcactatcccagggagtaactgtactaaataagtaattcttagtctcagggaccagtgctttatgccccctggtcctacagtctgtataattggtataaaagcattttatctagagattcacagaatgcttgttctagctctactgatttggcagtttgggtatctgatggaatctctctggccttggttttgtgacctacaaaatgaagagattggaatatcagtgattcctatcttccagggaacccagatataggaagcaaataaaagtggaccagcttcgtcatagcagggtgggaaatacacacatgcccccttcctgggttatcttgtcctggttggaaagctgctgggccagaggacctctcatagcccttttaggttgtggatggaccttccttctgttggccactctgctgggaacagtctttctactgctgggatcagcttaatttggggaagcatctgttctacctcttttaatattccctccagaagagagtgggaatgttgcagtgaagtattactgtgtgttaaatagcatgtggtttctgaggtcctcatcagttcacataacccagcctttcaaagaattttacatttttctgtagttgtcagtttagtttaaacatattttgaaacttatgttctgtgacagttggttgaaaattggcttagagcctccagcttttagactgtctagtaatcatcgttctacataatttatgtactcatgtcttctgaaaagcaaaagttaaattgaagtaagcattttttcctacttgcaacatctctaatcaaagtttaacccccttttaggccattttcctcatagtgtataaaaaaacacttgacttcagtgagtgttgtcatttgggagtggcattccaggcaaaacctttcaccttactcctatcaaggggtcctgcaagaagtctaaagggacactgaatatttgctgtcatagcatgagtgcattaaataaaggcacatctacttcttaaatctttagagattgtctttagctttaagaatttctctaaatatatgttctacttaaaaagtagtcataaagcacaaatgaagctaataaatgctcaacagacattcctttaaggaaaaaaatttgtgaacaccattggatgccaagcagatgtttggctttgaaaagacttttacaaactgttaatgaatgtcaaccctatatttgcttccaagaaaatatgaataaatgttggaaatgttgagagaatatttctttcatacgtgtacagctaaaagaggacacactgaatacactttataacttcataaaatgccaatagtttgctttaacataataatcatctgctcagccctgtccatctcctttgctattccaccttgactgagtagtattaaaggaactgcaatggctatattacagcctattagccaattatgatgaccaccaccaggtaagtctatatttgacaataaaatgtctaaaaatatataagaaatctaaatgctacagaagcctactgtaattcaacattttacagttttaggtgtgactccttttaggtaaaccatcatcaccattgccaccatcaccagtacacacacacacacacacacacacacacacacacaagcagaactgcagattacataattctaatgaggtaggtaacacgtaatggagagtacataaagtataaatgcacccgcttgggattttcgcaaagtgcacacactcctgtgacaagcacccaagcaggaccagcccccaagaagcccctcatgctccctttagttgaggagcctcccaaagataactgctaccttgatttccatcaccatccctcttattcattttactgttttgtttcatactaactttgaataaacatatataccttccacaaccacatccaaattcttgatgactcttttctgttccacaaattttaaatgcagtgctctgtagctttctactgaaggcctccccaaagctttacaaaatcagtcatcagtacatcagcactctcctctgttcttcagtgaaatacaaatctgcctaatggattgcttacggttctctgacagttctgatttgctaagaacatgatgtgtggaacctatggcatttctctgacctgtcagcctactgacctcattgtgtgggaaagggaagcagagttagctttgtgtaactggttctccctgaacccatgatggtttccagtgattacttccttttcagtaaacggatctgagccattttgacttaggacaagttaaagaagggcttggtgttttgagcaaggtggggcatatattttctgtgcagggacagatagtaagtatctgtaggctttgcaggccatgcagctttctcccttacagctactcaactctgcagttgtagcatgaaagcagctctagatgatttgtgaatgaatgggtgtggccatgttccaataagactataagtaacaaaaaccactgctgcttaaatttagccctggggccataataaagtgtctgtagctcatgaatgaacatggaaggaggtagttaaaacagaactttcctgcaatactgatggaattcatgctaagctctcctagtctctccaaggagagtaatttctagactgttcctttcttttctcaaaaattgaaacatttcctcatctctcctcactggctttctccacaattccttgaaaaaatggacattctttttatggtgccagctgcacaatctggtggctccattaaacttatccatgccatcagaaccaagaaaatccctaaaaataaggacatgaatttgttttacaatgaggtgtcaatacatacttacacatagcagcaggacagaaaggaagaacccagggccataaatatctgaccctgctcggtcactgcggtgccttccctctgttctaggaaaacccccagcaaggtgctagaggacatgctagcaaaagaatgaggaagatttgcaagctagccatctccctagagtcttgaactaaagcaagtggctctttgatttttttatgtggttttttttttgtgtgtgtattccccttatccccagtcccattctatttcaccttagaaaaaatattctcaagtgtttcatatgttcccatccatttgctgtactttagttgtatatatgtgattctgtgaaaaatatctatcatatgtgtattgaattgaagaaaagctttgtgtttataatgacactccagtaaataattttttttgagatggagtctctgtcacccaggctggactgcagtggtgcagtcttggctcactgcaacctctacgtacgccatcccccagccccagactcaagtgatcctcctacctcagcctcccaagtagctgggaccacagatgcgtgccaccacacccagctaagtttttgtattttcagtagagatggggttttatcatgttgcccaggctggtctcaaactcctgagctcaagggatccacctgcctcagtctcccaaagggctgggattacaggcatgagccgcccgccaaaaaaattttttacctttatttttctacatgtttttgagacatatccatgtcactatatgtagaacgaatttattttttgtttgtttttgtttttgagaaggtagagtcttgctctgttgcccaggctggagtgcagcctgatcttagctcaccgaagcttcgacctccaaggctcaagctgtcctctcacatcagcctcctgagtagctgggataacaggcctgcgccactactcccagctaatttttaaacttttttttttttttttttagagacagggtctgcctttgttgcccaggctgttctcaaactcctgggctcaagtgatcctcccacctagacctcccaaagtgcagtgattacaggcgtgagccactgcgcctagccaagtttgtttattcttatcactgcttgttattacactaatgcatatacatcattttatttatctcttctcatagggataccacagaggtttcctccaaatctttgctacaatgaaaagtactgcaatctatatcctctgtatgcccccaggcaagagtttttctaggagaaaactcttacatggggagagagagaaagagagggggatgggtatgggattgcttggctgtggcgtatatgtataattctttcccatcagaattgccacattattccaaaacaactctactagtgtgccatcccagatccatggaatagagttgctgtttccctaccttaataacaatacatagtattactgaatttataacttggccaatttgatggttgtgaaatgacgccttgttgttttgattttaatttctctgattactagagaggttgaacatctcacaggagtatttacctttctcagtttctgcttttgaaatttattcattcacttattcattcagcaagtgttttttgagtgctccctgtgtgccagtaaccttaataagtactagaaatagagcggtgaacaatgggaaaaaaataatcccagccttcacatcatagctgttgttcaataacatcagtaaatatacacacaaatattcaaaagacaataattgctgtgtgtgtgcttgtgtatgtgtgaatggtaataattgatatatatcaaacagacatatataaaatcagtggtaatattgctatgaagaaaagtagtacgctgaagaagggaaagggatactgaaatttctgttgggtttcttctcttttttcctgcttgtatatgagaactctttgtgtattctggacattgattttttgttgttgttgattattgatgtagcaggtgtcttctaggctggctcccttcttaattttgcctgtgatacccttccttaaacagaaatcattggctttgacatagtcaaactccactaattttttccttttatggtttgcacttttgggatataaaggacttcccactcctgcatgttcttctgttaactttttttttttttttaatctcaccctgtggcccaggctggagtgcgatggcacgatctcagctgactgcaacctctgcctcccaggttcaagcaattcttctgcctcagcctcccgagtagctgggactacaggcatccaccaccacgcatggctaatttttgtatttttagtaaagatagggtttcaccatattggccaggctggtctcaaactcctgacctcaagagatccgcccgactcagcctcagcctcccaaagtgctgggatgacaggcatgacccactgcaccccgcctcttctgttaactttacagctttagttttttcatgtaggtcttttacacatatggagtttatttttgtatatgctaggaaggaggggggatcctttgttattcatttctgcatcatgagcaaattctttcaatagcatttactaaacaatccactcttcttccctctgctggtatgccctgtgctgtagtgctcaggaactgaggccagactttccagagcctagactctacctcttagtagctgaacaacaggttacttctctggttttagtattttaatctttttttttgagatggagtctcactctgtcgcccaggctggggtgcaatggtgtgatctcagctcactgcaacctctgcctccccgggttcaagtgattctcctgcctcaccctcccgagtagctgggattacaggcgcccgccaccacacccagctaacttttgtattttcagtagagacctatattttaccaagttggccaggctggtctcaaactcctgacctcaggtgatctacccacctcggcctcccaaagcgctgggattacaagcatgagccacccagcccggccctggttttttaatctttaaaatagagatagaaattgttcttctcatagagttatgaagaataaatgagctaatacgtggcacctattattcaaatgtttgttgctcttataaattatatctaattttctcttatatagcctaattgaatatttcaggtgaaatatatattttgcctgacagtatatattatatactgtcatatataaagatttctctctgaccgttatggccttttctatgtcctgaattttttttttttttttgtctgatatttaatttgctaacctggctttcctttgtttcattatgtgtcttgtcttttgttttttctccaaatccttatgttcaatccttctgtataatatagtggttaacaatgctgtgtctgtccagcctgagcaacaaagtaagaccttgagtctccaaaaaaattacaaattagccaggtgtggtggcatacacctatggtcctgagacaggaggatcacttgagcccaggaggtcaaggctacaatgagccatgttggcaccactgcagtccagcctggcgacagagtgagaccttgttccaaaaaataaaagaatgctgtgtctgaatccacactgcttgggattgaatcctagcttcatcatttgccattttaccttaaaccttaataaatattgtttgtgccttggattcctcgtttgtaaaatggtgacaataataacttatgggattgttctgagaattcaatgtgttgggtgcaaataaacattatattgttattataattgttgctatattggacctcatttcttcccatttattttggtttccatctattatgattttgtttcttttttttttctccccctaactttcactctctaggtcagattttcctatgctggtttgaaacttttgtactctattctgtgagggaccctttcccctattgtttctaacaggcattaatgtccctttggaggaacagcaaaagctaggtcctgattaggtaaatttggaggcagggcccaatctcagttcattaaatccctgttttcccctagtgcctttacctgagctctcctcttgttagaggcagctgcactctgatggaattccccgtgtgaggtggcattcgggggtctgtcagcacagccatattactggcacctgtccctgcctggctctgtgccttcaggttgaccaaaagatctggctttcctgttccaaggcatgcgtaggaattctttctgcagttttagctttagggcactgaggatgtactcctggaattggagtgttttgttttttaagcatgttattttgggtttgatttcataagctccaaacctaagccaaactctacagttggaatgagtgaggctccatccagcccagtctcaccccactcatgctggtcagctcaaacagggtgccatgggcagggaacaatgcagccagaaaccttgcccatctgtgtgttcttccattatccctcacatgccactcttttcctccatgccgctcagcttctcccaagtattcaccacttcctgtcgccccaaaggtttctcttgaatttgtagttgataattatgaccctgaactttactggcctccttttttaactcctgacatcttcagagttgtattttagtttctgtcaatagtctgtgcgaccaattgttccaccttccactaggtagttttaaggtgagagaaggttccttggagaaacttatccacacaacataggaaggtcatgaggcagagaagagcaagctgattttcttccagcctaaacaagctctgggctgtgcatgatggctcacacctgtaatcctagcactttgggaggctgaggtggaaggattgcttgaggccaggagttcgagaccagcctgggcagcatagtgagactccatctctacaaaaaaaaaaaaaacacaaaaattagccatgcatggtggcgtacatttttagtcccagctactcgggaggctgaggtaggaggatcacttgagcccaagaggttgaggctacagtgagccaagattgtgccactgcattccagcctgggcgacagagcaagacctcatctcaaaaaattaatttatcaatttaattaaataaataaaaaaactttatcccttccttacctccccagagtcataggaaaagagatcacagggcatgtgtgctccagtcagacactgggaatgggaagggaatggaggccactctgagaccaagctcacaacagggtagagctgaaaggggaagcactctaggccttcttgaatagaagtgcttcccagttgagagcacaccagtcccattggcaaggctccctaaatagagaggtggcatggcgttgatccatgcaggaaaaatttctgtctcttcagagcaggtgtacagagagggactactatcatataggctgtcaatatttaactcccgggacagtacctcaataaaagtccttaaattaataactcttgggggcagaagaaagatcctgagatctgctttattctccttgtgttcttccgcagagctttaatcacatactaaaggatcacttaatacttaagtaaatacttgaatcaatgacacctggaggcacattcccaactctacactcttttccaagtccaattccaacttttcagtcagcatgcttaaatgagtctgccagagtatcccactactatctaaacttctgagtatctagaacttccctgatacttttccgctgtcaatattcttcttgccttttccatttacgtttagaccctcattctcccagtaacccaaatttgaaacctcagggtcatttttgaaaccacttttatttggggccctctgtgtttttattttcattttcattgtccttttcctagatcatattcagatatatataaaacatactttggtcaatccaaattaatgtttttaggaactgcctcaaccatgctcttttttttctttttctctctttttttttttttttttgagacagtctcgcactgtcacctgagctggagtgcgatggcgcgatctcagctcactgcaactgcaacctccatctcccaggttcacgcaattctcctggcttagcatcccgagtagctgggattatgggcgcacatcaccacactcagctaatttttttttgtatttttagtagagacaggtatgttggcccgactggtcttgaactcctgacctcgtgatccgcccacctcggcttcccaaagtgctgggattacaggcgtgagccactgctcctggccaaatttctctttcttgtaacatttccatttatttggttccactacctttttttttttttaactgtgaatttactagccatttttgtttacaatggaaactctgggaattcaaaattaacatcctcgcctgtgagctgcttatagacaccagaaaaagtttcagccttgctttccatgttgttctcctatgctttgtccaaatgaacctttatgagccggctgtcatccagtttcacacagattctcttgcccacaatttcacttgggaagatcaagtcctcaagaattgtgtcatatacagctcctaggatgtttttgcttattttttgtatggctttttcaagctggcttaggcagaattctcctctgagcaataaagacagcatgcttcccactgaactttttctccaattcacgtactagccagagttggattttctggaaagatttcagttgaggaacaggaacaaagattatgatagctttctggacaccaccaacttaggctctttggctgctgtaatactcagcttcctgagctgagccttgaggtccgagtttatctccagctccagaagagcctgaaagatgccggactcttaactcgtttggcgtctcgctgttgggcttcacagtcttggtgcttgaaatgaacatggccttctccttgctaagcgccagcctaggaagagcttgctaccatttttaattctgccttgtgctgagtacagtgctaggttcaatataactagatgatattttctgaagagaaaatgaacagcaatattgtagataaactaagctttcttgtgtgaacaccataataaatatctatactaggcggagttctctttttagtgcctttcataggtctatttgctaattagtgcacacatgcacatacatgcataatcaaatacacaccatcaatagaaacggtccctatttaaactacttatctgaatcattgaagcagaaggcagtacgtttacctataaccacataaattctacaaaagagaggttttatatctaaaatgcattgcagaaaggaaatcttttttaaatttgctttccttttttgtcctatggaaaggctatctgtattttatttctgtagactcagtctctatattgtaaggtctcctgaatgcctatgactgcacagtatatcaacagatgttggttttggaggctaggagagctctcactcatcagtcatttgaatagcgcacttctaggtaagaagtggttgaatgtttcattatgtaccatattgctaagtatcatttttaagacttgctatgtaagctgctgttttcattccaagtaacaagttgatggtgagcttctagaggagttaacaatattttgtagtttttgtacatcaggtttttttttgctgtatcttaattttttctcaatgtgaaattttataaatgaacctgccaaattttagttcagaaggattcaagtaagatcttctagtttacgtttttctctccttttgtaatttctgtaaatagtcaacaaaatatgagtcagttggaaatacactgatattcacaggagaaatcttaggaagtttgttgcaaagaaaagcacagcagatcccctcactaatgattctgacctctaaataggcacctggagcagacctcaaatttaaagtttgaggaagttaaagaaatttagtaaatactgggcttggtcactatataaaacacttcaggagaactagaaaatactatgttccttcatattcttctaaaaagttttctagatttaccttctaaaggcaacttcatagtaatttttaagtttccagtataagtctttgagatcatattatattatcagtataattttgtgtatatgtaagaattttttaggttattaatcccaaaacacaatccagtggataaattattgtattccttttggctacctataaaaaattccttaaattatcctttattatacatctattatatatatgtacatatattcttcatatttcatttagaaaggtgattcatttagctaatcccattaagagtgcaaaacaagcttcatgtaagatggaccacctatatacttcttagcttaaatggtaaaaatttccagtgctctgatctaacgttcacagggcagtgagagttactgcatagaaaataagaaaaataatgaataacatgtgcagaaactacagccaaaataatatctgaaaagcatattgcactcagtgcacgtctaggttgtatcagaaaggaccaccctctgtttgtggagccacagggaagagaaagggacgtttacagtacacattggatacgtagtctttttccatggagtctcttctaccaaagaagaaaaagcaacggtggaacagaagataactgtgaataatttaaatcctggatgcagacccacaaatggttaaaataaaacaatctcagggaagaaaacagtgcctttatgatgtttcagaattatacgttgagtcactattggcatttgtttaggttttagatattctcagccatggatatgtgattttttttatagacataggaagaattaagttgttgtgtggtaaggtagttctagactcatggaaattgtatgaatctagaagcaagtgtactgacaatcaagaaagtaaataaactctgagtagagtaatcttttaacaggtggagacacagcagtagaaaataatatattctggagaattttgagtgtgaagttaaaatttattatgtgctatttctgttacctgaagtgaactctcctctcctttcaaaggccaagtcaaattctaacttatcaagggaggcctcttaaagcccatgttgatttctgaaattatcaaagaggggcaatcatatcaaagctttatgctacattcatttttaatgtcttataattttgttttgctatattgtaacccccttgtagcaaggaaccattttttaaatggatgctataaaaatagtggatcttttttactgacttcagcttgacaaacctgaatccctttcagccacattccttccctacagccttctgccaggtactcacagcacactatgctcacacccagaggctcttgggtgtgtacatgctcttcggcttccatgaattgacttggtgcattgtaagtggggctcgttccctagtatgtttattcctgttgtacttcttgaaataatcatttaattaaatatctcataacttcattcaaataactgagtaaaaattattgctagtaaatccaggtataatgctctaaaagactttttgagttgctaaaaaatattgctgtcaaattttggagtaaactaactataaactggggtaaaaggaatcagtacattctggtctccattttagtgaggcaaaccattgactatgcctgagtgagatttctgctacaaaaacatgcagtttcaaacagcagacccctatgcaaagtaaggttctttgacctgcatcacagtttgtacatttatattttgagttaaatattttaagaatgtatattttattttgtatgaatctccacttaaatctgacatctttgtttagcaaccaactgatgtttcagaatcataagaaaaggcttccattatgtcttttgttttaattttttatttccataggttttgagggaacaggtagtatttggttacatgaataagttcttcaatggtgatttgtgagattttgtgtacccatcacccgagcagtatacactgtacccaatttgtagtccccctcccaccctttcccctgagtccccaaagtccattgtatcattcttatgcctcttcatcctcacagcttaactcccacatatgagtaagaacatacaatgtttgtccattcctgagttacttcacttacaataatagtcttcagttccatccaggttgctatgaatgccattcattcattccttttatggttgagtagtattccatctcattcatatatgtgtatgtgtgtgtctgtgtgtgtgtgtgtgtgtgtgtataaaatatataaaatatgtatatataaaatatatacacacacatacatatatatacacacataccacagtttctttatccgcttgttgattgatgggcatttgggctggtcccatatttttgcaattgcaaattgtgctgctataaacatgcatgtcccagtagcttttttgtataatgacttattttcctctgggtagataccccatagtgggattgctggatcaaatggtagttctacttttagttctttaaggaatctccacactgttttccatagtgattatactagtttacattcccaccagcggtgtagaagtgttccctgatcaccgtatccacaccaacatctattcttttttgatttttttattatggccattcttgcaggagtaaggtggtatcgcattgtggttttgatttgcatttctaaagagcttctgcacagcaaaaggatcagtcagcagagtaaacagacaacccacagagtggaagaaaatcttcacaatctgtatatccaacaaagaacaaatatccagagtctacaaggaactcaaacaaattagcaagagaaaaaacaatcccatcaaaaaatgggctaaggacatgaataaacaattctcaagatatacagatggccaacaaacatatgaaaaaatgcttgacatcactaatggtcagggaaatccattatgtcttcaatcttattccaagagggtcatccacttttgttttcccgagatggagtcccgctctgtcacccaggctggagtgcagtggcgccatctcagctcactgcaacctccacttcctgggttcaagcgattctcctgactcagcttcccgagtagctgggactacaggcacgcgcccctatccctagctaattttttgtatttttatttgagattggattttaccatgttgcccaggctggtctcgatctcctgacctcgtgatccgctcacctcagcctcccaaagtgctggaattacaggcatgagccactacgcccagccagtcatccacttttaaagcttggtaatggaagcagatgctctggctagtagcagctgcagtgtgcttttgaaatgtctctcactatatcattttcttttttcttaaatgggcattgttgctaagggcaatcctactctttaacacctcatttaaccatacagaattgaatgaaaatcctcagccaattttaatttgggtgttgaaaattacagtatcaagcagagaaagcagtggttggttgtgatcaccatgaagaaaactaaatttagtccaactcttttctgatgctttttaaaaatcactaatgtcagctcaccttgcagagatttctcctttattacaagtttagttatggaaaaagtaccactgtttcctagttctgttgaacccttggtgtaacttcataatgtattcatactgttagactattaaagagaatttgataaagctttcaaatgcttctctctattcatgcccatttcccattctagatcatttattggtgagcattcctttttgacatttactaaatgtcaactatagtccaggtttaaacattggcctacagccagtggacttaccagtttatattagcctggtaagaaaaattaaataaaatgtgaaaatgaaatgaaaattgctttgaagaaaaatcaagctaacagtgaaatagcctgctaatggcctgataggcattcatttccttgctgagttcacagttgtgtcattttgtactattgccagactgtaaaaggaaatccaaagaaaaaattaaaaatggttttttcgtatagcaaccatgtattgagtatctattttggatcaggcactaaaaatacaaagaagaggagaccaattgactttacaggcagctcacagtctaatgcaatgattctcagacttgaaataaaaaccagagctgctctggctgaagcagttcataagggcagtggggcctcctgaaggcacatatttgtgcagagtatctaccactaaaaatttttcctatggaatgatcaggaaaatggacaaagttgtatcgattctctcaaagtggtgatcttcatttttaaatagaatagtaaatgatttttcagatgttttagcagatatttattattagtcatctatgccacataaccttgataaataatttagctctgagatgtttttcttgtttgaacattgtgtacataagttgtttcttactatctaattattagcttaactgtttgttagaacaatttattgtgtagttttcctgtctttctctatagtttccaatacagtgtagacagtgtgttatgcattctgtctttgaacccttctgtccttgtcctagtgtttattcctttttttttttttttttttttttttttgagacggagtcttgctctgtcgcccaggctggagtgcagtggcacgatctcggctcactgcaagctccgcctcctgggttcactccattctcctgcctcagcctcccaagtagctgggactacaggcgcccgccaccacgcccggctaattttttgtatttttagtagagacggggtttcaccgtgttagccaggatggtctcaatctcctgacctcgtgatccacctgccttggcctcccaaagtgctgggattacaggcatgagccacctcacccggccagtcctagtgtttatttcttaaatggctttagaaagtctgtgaaaagtaactccaaatctaataccagatatgattttaatagagatactggtgttttctgttcctggtccacatttgtataagaggttgcttgatttttacttgacccttagtggctttggaagaaaatgaagcccatgaactataatcagatacttggcattttccatggtgtctgagaattaatttaagtagagttttaagtgtatagtacattatctaagatcagattgcagaagctcaaaacttttactttccagctactatgtaggatttagttagtgtttggcagcatttatgacattgtttttaatttgtaagtgaagaattagaaattctgatgtttgttaggaagtaaaggcattctggcaggctaatgtttaacaaagcattctctcttctagatgtcacctaggggtttgcctctgaggcttgtttttatttattttaattttccttaatacagtaaccaggttaacagatgagtaaacatttgcaaacctaaaactttatcataaggtttcttcagagaactattcatttaggtcttttgcatcttttatccttcaacacgatggcatttcaaaattccttttttcagaaaacagtaattgataatgtgtttcaatttcagggtttctcctcttcaaaaatctgaagttgttgagatggttaagaaacaagtcaaagtcgtaacgcttgcaatcggtgatggagcaaatgatgtcagcatgatacagacagcgcacgttggtgttggtatcagtggcaatgaaggcctgcaggcagctaattcctctgactactccatagctcaggtaaagcgtcatttctgcaaaacacatcattcctctcagtcaactgatgctttgaaaaggaaaatactaattttttcccactcttgttttagttcaaatatttgaagaatttactgatgattcatggtgcctggaactataacagagtctccaagtgcatcttatactgcttctacaagaatatagtgctctatattatcgaggtaatagcaggttaaattttaaatccttgtcatttgcatacatatttaaagaaattttctttatggagacgttttctcatggttttaattaatattttatttgccaactctttataaattctaaatgtattaaaacaaaaaggtggcctgtaatcccagcactctgggaggccgagataggcggatcacttgaggtcgggagttcgagaccagcttagccaacatggtgaaacctcgtctctactaaaaatacaaaaattagccaggcgtggtagcaggcacctgtaattccagctactaggaggctaaggcaggagaatcacttgaacccaggaggcagaggttgtggtgagctgagattgtgccactgtcctccagcctgggcaacagagtgagactccaccccaaaaaaaaaaaaaaaaaagtttgtcagccatggagaattatgtttaaattctagctaaaaatgttatgttgctttgataagaagtgttgaattagagatgctaatgagataataatgtatttaatgtaaaaaatacattattaataatgtataaaagtctataaacttgactgcatttttaataaagctcaaaaacatgcaaaagaaagcaatacaccatggagggataacacacatgtagaaaagctattttttaaaaaaggtgagggaatgagaaacatcaactgaagctagcacctctaattctgggaggagacaaagaagtgcaatcaggaagaatatgcaggtagctttgctggtattgttgccttgttgttcctattatgtttcaaaacttagatctttgttacatacaagcatccctctctatccagatctgtttttgtttccgtgtttggtgagtagcaagagttcagatgatgaaaaatttgtctaaaaattatcagaatatttagtttctgtctggatagcaagggatttctataatccgttttatgtgtcaaacataacatcattttaaaaatgaaaacctgagtcaggaataccacttttaaaaggatgcattttgttctgtaaacaattttgtagcacctactgagcccagacaccaggcttagtccaacaactacaaagtaaatcaagcatggttcctgtcctccaggaacttgctgtattactgttctcacactgtggataaagacatacccaaggctgggcaatttacaaaaggaagaggtttaatggacttacagttccacatggctggggaggcctcacaatcatggaggaaggcaaggaggagcgagtcgcatcttacatggatggcagtgggcaaagagagcttgtgcaggggaactcctctttataaaaccatcagacctcaagatggttattcactatcacgagaacatcacaggaaagacttgcccccatgattcaattacctcccactgggtccctcccacaacacatgggaattcaagatgagatttgagccaaaccatatcattctgcccctggccccttccaaatctcatgtcttcacatttccaaaccaatcattccttcccaacaataccctaaagtcttaactcatttcagcattagttcagaagtccacagtccaaagtctcatctgagacaaggcaagtcccttccgcctatgagcctgtaaaatcaaaagcaagttagttacttcctagatccaatggatgtacaagcaatgggtaaatacagctactccaagtgagagaaactggccaaaataaagggaccacaggccccaggcaagtccgaaatccagcagggcagtaaaaccttaaagctccaaaatgatctcctttgactccacgtctcacatccaggtcaagcatgcaagaggtagggtcccatggtcttgggccgctctgccccgtggctttacaggatacagcctccctcccagctgccttcacaggctggcatcaggtgcacaatgcagtcagtggatctaccattctgaggtctggaggacagtggccctcttctcacagctccactaggtggtgccccagggggaactctgtgtgggggctctgacctcacattttccttctccactgccctaacagtggttcgccatgagagccctgcccctgcagcaaacttatgcctgggcatccaggcatttccatacatcttcagaaatctaggcagaggttcccaaaccccagttcttgacttttgtgcactctcaggctcaacaccacatggaagctgccaaggcttggggcttgcaccctgtgaagccactgcccgaactctatgttggcccctttcagccatgtctggagcaactgggatgcagagcaccaagtctcttggctgcacacagcacgagtgtaccctgggcctggcccagaaaaccactttttccttgtaggcctctgggcctgtgatggaaggggctgccatgaaaactctgacataccctggagacattttccccgttgtcttgaggattaacatttggcttctcattacttaggcgaatttctgcagcctgcttccatttctcctcagaaaatgagatttttcttttctattgcattgtcaggctgcaaattttttgaacttttatgctctgcttcccttacaaaactgaatgcctttaacagcacccaagtcacctcttgaatgctttgctgcttagaaacttcttccaccagatactctaaatcatctctctcaagttcaaagttccacagatctctagggaaggggcaaaatgctgccagtctctttgctaaaacataccaagagtcgcctttgctccagttaccagcaagttcttcatctccatctgaaaccacctcagcctggatcttattgtccatagcattatcagcattttggtcaaagccattcaacaagtctctagggagttccaaactttcgcacgttttcttgtctttttatgagctctccaaactcttccaacctctgcctgttacccagttccaaagtcacctccatgtttttgggtatcttttcagcagcaccccactctactggtaccaatttattgtattagtctgttctcacgctgctgatgaagacatacccaaaactgggcaatttacaaaagaaagaggtttaatggacttacagttccacatggctggggatgcctcacaatcatgatggaaggcaaggaggaacaagtcacgtcttacatgggtggcagcaggcaaagcaagagaacttgtgcaggggaactccccttttcaaaaccatcaaatctcttgagacttattcactatcacaagaacagcattggaaagacttggccccatgactcaattacctcccaccagtccctcccacaacacatgggaattcaagatgagatttggctggggacacagccaaaccatatcacttgccaacagaaatacaatgcaagccacattagcaaaaagcaaaaaaaaaaaaaagaaagaaaaaattgatctcagtatattttatctagctcaatgtattcaaaagattatcattgtcacctgtaatcactgtcaaaaattattaatgagacattttacatccttcatcctaagttttcaaaatctggagtatattttacatttataccacgtctcaatttggactaatcacatttaagtgttcaagagcacgtgtggccagtctctaccatgctgggcagcacagcagtggtagataaataagtgaactgaatggttaatcaaggcatgataaatatgttatttgcctttttttaaaaagttgccttcttattgtcagaagctatatgtgtagtaattctaggtgttatcagtttcatgtccctgttggagctctgcagatcatgacaatggccttcccattgttaagaaaacctcattctcccactcctgtcaaggacccaccatggtctcataaatctgctgagggttcccttacagatagatgtttgtttctgccactttaccatttaatctgttgactgtttctacacgtctgtcaaaaaagatacagccaggctgggtgcgttggctcacgcctgtaatcccagcactttgggaggctgaggcgggcagatcacaaggtcgggagttcgagaccaacctggccaacatggtgaaaccccgtccctactaaaaatacaaaaaattagctgggcatggtggcagttgcctgtaatcccagctacttaggaggctgaggcaggagactcatttgaaccagggaggcagaggttgcagtgagccaagactgtgccactgcactccagcctgggcaacaaagcaagactccatctcagaaaaaaaaaaaaaaaaaaaaaaaagatccatccatttgctatatggaaatcatattctatcctttactctgagaagtaacagtataaacaaagtcagtacgttgacactttcgttgggggctggtgtatatttgcttcacctgttctttgtgcctctgtcagaatgcttatctccttgttaaatgttgactgagcatagttcttattatgagtcaggctagtaaaattgaaacttagttttgaagtgtacaggcagtttggtgtaatggtcactaaaaaggttacaacctattagataaaataacctaatacaggccaggcgcagtggctcacgcctgtaatcctagcactttgggaggccgaggggggtggatcacgaggacaggagatcgagaccatcctggctaacatggtgaaactctgtctctactaaaaatacaaaaaattagccaggcgtggtggcaggcgcctgtagtcccagctacttgggaggctgaggcaggagaatggcgtgaacccgggaggtggagcttgcagtgagcagagaccacgcgccattgcactccagcctgggtgacagagcgagactctgtctcaaaaaaataaataaataaaaattaaaaaaataacctaatatgtggaaatataaacaagatacgtaaatgaacttactcgttcattactgctagatttggtctggaatagtgtgtgttttgaagcaaaatgcacttctaaaatagtttataagattcaaaaaaatattctttgttgtttatataaatgtgtagttcttttctaaagtaattatttttctattctcaatcccttctatatatctagcttttctatttatatgttcttctcattccagaacactgacattcaagcaaataacaatttatacagtttatttacatagatttatcaagataccaggaatttaaagccactgccagcaataaatctgcttataaaaagttaattttataaaataagaatgtccaacttgtcgctttttaaatctaaattgacagcaataaagtagacaaaatttatgtactaatgagaaaataaaaacattaaaatcaaatgaaaacaatcttcatgccctgtcctgtttcaaacccagaattatgtgatttgtggttgattaaccctaaacttcacttgcctttgattttaaaacctgttcatgagatatttgacactgatcaaattctttacacagtgaaaaggaagtgagttctaaactttactggaaatctcatttttatttttctcaagagtttgtggaaatgtattttgaatatgattcaactgtcttggtaatgaccttttaaatcaattcccagatacccaacttttgccagctaaaacaagttctgcagatgttaatggctcatgtcaatactgtgaatgaatagacagaaaacacatcattgaatgtctctagtgaggacaactgccagtctcgaatctctcctttcagttttttgtgctgatcaggcgtgggagcagaggactcattgactgtttgtaagctgctgtttaatatgcagaaatgctccatcaggaaaatgaatgtgaagctttagctgccacgcctctactgggaggtggaatttagaaaataatgccaggagaagcaggtctgaaatttctatgctaataaaggaatagtcttgaacactatgtgttttatagatttaaaactacaaacactgcttttctccttgctatattgcttaggaaagtcactatctagatattccattgctgtaaattacagccagacgaatacagatttggcagatggtggtataaagctctttcttacaggagctgcccaggagcagctctaggtgttcatttaaattattggctccttttaaagagagatttttttttatttctctgatatgtctgactccttcctcataaaataagacctttcctttcaaatgattggtcacatccaagttttctgggaagatctcaaaaccaagttgtgtttctaatttccagaagctttgataaaagtcaataaggtgatactgtcccagcaagtggtgctgggagttgaattccctgtgaatttaaataaactagacacctccccagagggaccggtgttttctttctgaatctgtggctctggttgaattagaggaggtacttttatgtgtttgggataatttagatgttgttttattttgcacgggatatgttcccaatattaactacaatctcagcctaacttgaaatcggcctgctggtaggctacttcactgttaaagaccttctctttctcctttaagatatgtaaacttgaatattaaaatattagagtgaaaatctaaggtactctattgaaagtttctgttcttacctagtcatttcttctttaaaaataaattaaaatgttaacccttaaaaatccaggaaatacattttctaaaaacatgttcacctacctttcagtaggaaaaataaaatgataaaaatgtgttgatacctttccacttaaaaattgtcgtaaagtataaagcaggtcatgcattttaaaatacactttggaaacaaacatgttagtttacttgcaaattatttcaaatttgaaacttactgtaaatattgatttgagggagaatcttaaatttcaagctcgtagtagcctttgaatcagcaccaaatattaggtacacagaagctaggggaccattcgtatttactaatgtttgcccacatataaacttactaacataaacttctcattgtacggtattgatgattgcaaatgcatttagaactacaacttttgagccaaatcttgtccgttagacgaatttggtatgcagagcgcttcggctttcttcagaccaacaaaggttagactgtgtcttcatagattagagaggccataattggaagtttgttttgaaattccttatatttccatcataccttaagaaatctgaaagagctttttagaatgaattactacaatagatcacagttgccttcatggaaaatagccccatcactctgagtatcccaaatatgtatttacataatccacatctcaggccaaatgtgaaaacacaatagagagcattaatgtctgttttgtcaatttgtgtatactcaccaggaaagaataaacttcacttcatgtgaagatgctcagttcttttaaagtttgcatgcatcaatgatctggctgtttgtttagggcaaattatcaaaaattttccataaatatgtgtagcaaagcaagtaagaatttcagatttgactctgatttctctgcttttgttgtggttaatatgtgttacagctctaacacaatttggacttatttttaatgtgctattgctactttgttttcttttccatctcataaagcagacattagtttttatacatgctcaatcattcctttccactgtaaaaaggaagatcagtgtggctacagaacctgttcatagggaggccagcctgggtatatattgataaatggtgaatttgtagtaattcatgcttccataatgaggttaaatgaaacgtgaagtgtagcaaattccctgcaactctgattcaaaaattcagttgagccgcatgtcaagaccgctctcctctaacagttttgtagttgtcggtgttgttaggttttgtttttgtatttgtgcttatgtaatctcattgctggaccagcctttgtactctcccagatccatttgatatttgatttttaattatacttcaggtctgctttttaaaaacaataacgtaggtactattgtttactaattgtcactttaatttttcttatgttttaaacatgctagagaaaaatttgtccatattgtcccttaattttgtttccaaagttaagatttctgttttaaagagaattgtaaaatatataagaacattatgctctagtcaagatgggattttatcaatgaataaaatttaagttaaaatattttaatatataaactcaaatttaagattccattggcagtggttatcaagaactattaagaagactcatgtactttgacctattccaccttaagaattcaccctaaggaaaaaagagagatatatggtttcagtttagagttatttataatagcaaacaactggaagccagctaaatgtccaaaatagttacatccacattgtagaggttacatatccattaacatcattttaaaggatatgtgacaacttaagaaaatgcatattacataatattaagggggtggagcagagtatgacactctctatatgcaggtttccagtaaggtaaatttgtgaatttgaatgaactatacaaccagtgcagacaaaaatggtgattgtactattgcaggaaactatttcctaaataaacaagtgttacttttataattttaaaaaacaatctttaaataactacaatcctgatattttaaaagggaattgaagctgtaaaaatttaatggcatataaatatattctctgaaagtaccgttaagaaaaacaagattatttatcatttttaaatcgtgattgcctgttcatatatttcttttttgattcagcaagcaggaccaattctgacataaataacaaataccctatgaaagcatctctttcaatcagaaagtaaaccaaagaaatgtcattttcaaaagagtcatgagtataatatgttaatgctgctattatgcagcagttgagtatacaacagattctaagcaatgcatttatgcttttgtattctaatttgggggttttgggttttttttcctagatctggtttgcctttgttaatggcttttctggacagatcctctttgaaagatggtgtataggtctctataacgtggtaagtttaggacatttgataattcctgtttcattgaatacttgggagataaaggttcaccctgcatttggctgcttgacataatgaccagtttgtgcgctttagatgtttacagcaatgcctcctttaactcttggaatatttgagagatcatgcagaaaagagaacatgttgaagtaccctgaattatacaaaacatctcagaatgccctggacttcaacaccaaggtaggacacagtgccctggctgggacatgtttggtgggtctgtgtttactgccctcattatatggggtatgtggttttcaaaggccaaggatacactagcctgagacaactccagggtaccgactatggcaagtcatatttcttaaggttctgatacaggcagagaaggttttttgttggttggttgagtttggggttttttgtgtgttttattattaaaatgtaaccaaattcacttgggtttgtaaggcagcaataaagctggcctgacgtataaaaatcattgtccttttggttctctggccttctgtctttgcagtgttgtggtgacatgctcactcctcacaggggttagtcatctaggactggtaaggactggctttatgtgtgtaaaggagtgagagaggtattttattgttccttaactgattttccattttgtgaaataactttgtcctcattagaattttagattgattgtgtcaggcattaaaattacagtctctgggaaatagtactcagtatttccaagctctaaaattaaaaatacaagataaaatatccaacagtttatctaaaatcacattctgggtgtgatccaatagtatttatcccagacacacacacacacacacctcattttctatatagtttactttcctgcaagtatatattctaaagtgtttccattggtatttgttaataattcaatttcttgtttaatgtgagtgaggaggaaaaaatttaatattacaacaatcaagttaggtgtcattttgaaactaacatttgtatattagtgttatgaaagcaacaaataaaatacactttcacagaattgtttttgtttaatatagtgcatgtttattagcatgttactgataattagatgtaaccttaactcagaatcttgaattcaggacagttaatgtaggatattttaaatatttaggaattcataaagcttttcaatggcattttccatatgccaagagaataaagtgaaacaggtgttttggtgcctctaacctcacagcataaacgatagtgctaggtttatgggcaagacattattcttctgagacgtgatcttcacgaacacagcgtgcctatgtatccagctgtacacatgcatacaacttggtggcactgttttaaataaatgaatttggttagctcaggacagacagactgaaggattctttaacttatgccattggttctgaaaagtatttttagtggactctcttaaaactaatactattaatgtgcagttatctctgctttcatttttaaatcttttacttctagatttttaaatttatttgtgatgcccagtttgtattaaatttcatcacattgctgtaatgtttttcattacctatggtgagcattcacaaatgatggcaagccacaatcagactatggcctctggttcccctgaaaaagtgatctgagagctggggaagttccaggtctactggttggtatactaacaataattctcaccaaccaacctcagccacaggcctcgtctaccatagtgtgggctccatggtactgtctctgaatttagcctctaaccacaaatttggccatgccattcttgcttaaaaacataaattgatcctcacagaattaccccaaatcattcctgcaaaggcacattcttctgtacatggcaacttggacacatttttgtggccaggaaaagggtatagcgggtagtatattgttttaatgtgggagcatcattcctcgtatcttttattgttgaaaaaagtcttttcattatctgtagagcccaggagttcagacaagtcatcagatcaacccaaatgggttatacaatttctatacccatttgagtgtttatagtttttatacacgagttgccaaccctgttttacagggtttatggatttttctagtgatttcagtgaaaagtatttgattcaatctcatataagtgtttgaaaattcagggacaaatggctacaaaatgcacagttgtatacacagcagttgctgggggttccaagtgcgggagcattgttgccctgaatgatgatgcttatgtttgttatggtaaaaagggtcggaggttctgaggtcgtgacaggggttaaaggattagcatgtgacaataagtatcagtcaggaaaatggaaaagtagaactaatttttcttgcacccacctgtgctttctgtcaaataaaaacttgtggtaatgacacagtgaggagaagagacaaaggttaatgagtaacacaagttcaaatgtgtaatgtattggagcgtaaattggatcatacaatccagtgtggctgggagaactaacaaaagagattgagctcacagtggaaaattttgggaggcaggcaacttaatttctgttgtttgaacagcttaaaactattaatacatgccagttttatttagcataagttttgtttgcaagaagcacttttaaatgacaaaactacaactgttcagaggggccataagaattctaaacagtttttctataacttaatctttcacatccatgttacaaagaaagtaccagtgacgcttgctctcttgttcttaaaatacaatagatataaaaagtagtaactattatatgatgttataattatacaaaacttggtattaacactgttaaattgtgaaagcctttagtaaagtcatagtcacagtgctttatttgtatgattatataatactggctataacgagtatatatcttgataccctgcagagaatagtatagagtatctttatatctcttgataagagaaagcattacatctttagcattggaaagcttacagttatatgtggggaatataaagggatttccccaaattataatcttttaaaagtctattcttctggaattatgaaaatagtcccacttaaggaatttcagaattctgcatttttttattttaaattttattttctttttcaggcagaaatttaaatttggtttttgagaagcagaaaaaaaaattcaagtgaagctgaaaaaacattttgagaaacataaaaataaataaatgacccatgaaagtctaagaggcagaaagtgtctgtcagttctattaattcacagtggtggcccgacagaaacacattttgtgaatctagctcatagataaaaagaaaggtcagagttcacagagctagtttatcgcaaatggttctcatggatttttgttttccctcaggttttctgggttcattgtttaaatggcctcttccactcagttattctgttttggtttccactaaaagcccttcagtatggtaagtagaagggatatgaatgcaaagagatgactttttacttttttagaaaaataactcattgtcaatgtatgtttaaaagtatagcagtttcattgtatgatatttctcttaacctaaaatgcatgcacccaaaaattgtacacactttgaagatttttattattcctttgggagcaaagtgatttaatatatgcaaagcctttcttctttacgtctcatgttttccaaacttgcagagagttaaattttagggctttttttccctctgttgatgtatagtttgaggacaataagtgctaatattttatgtagcctatttattatacctatgaggcttgtatcaagccctttatactgaacttaatcagacatgctggtattttgaagtatacttgagccaatgttttggatgaggtttttaatatgtttttatgttcatcttggagtgttagcttttactctgctcattttgagggaagtgattttattctctcggtttggagaaagaggatcatggtgcatttcctatacacataaaagtcattaaatagctactttagaaaagagatccctgtgattcttaagctggtgctgctctgtcttggagccgactttgccttgagatcctcgggaagacaccaaccattcagcgtgcctgcttcaatactacggtaatcaaaaacacaacacatagtacacccaaggaattgtcagtcctttataagtacaggccatacctacgtctatcaattaatggttgccaacagaagagagtgctgcctgctgctgcccactgatgatctcctctccataggtagccagagtgatccctgcagaacatgaatcaggccaggtgcttccctcctcagaattccataaagatttagcatacttagaacaaaatcctccacctccaaattgttccccattcttcacagatattcgaattggctctctcccctccgatgcctcaggtctgtgctcaagaagccttccccgatcatcctgtccaaaagagcagccaccacctgcccccactgctcctaggctctattcccttgtcagcctgtatgtcttcatggtacttgtcaatcaggttttgatatgtttgtttcttttgtatgatctttctcaaaactcttttaaaattgaagcttcagatgggcaggtaattagtagtttcgttgcattcacagtgcttagaacagtgcgtagcttgtagtaggcactcagcaaattgtgaatgaattaccaagagcttgtggcataagcgaggtgagtattacaaagaaggcagtggtttcatattctagctaagattttaatctccttttttaattgctcagtaaattacaacagtaaatacttttcaatgtctaggctgtggaatgagcatggtaagaatatttaattaaagtgtagaatattgaccctggaggccaggagaattacagtgagttagtttgttgcttgcttgtttggctttgacatataattcacataccataaaagttaactcttttaaagtgtacaattcagtagttttttagtatattcactgaattatgcagatgtcaccactatctgatgcccgacattcatatcatccaatagagaagccccatatccattggcaatcactccctgtttctccacaccttccctaccagaccctggcaactacttacattttttttatctctatggatttacctattctagacattttatataaatggaatcattatgtgaccgtggttcatccatgttgcagctggaatcaatacttcctttttatggctgaataatattccatggtatagatatgccacattttttaatctgttcatcagttgatggaccttcagattgtttccactttttggagcaacaggatatggaggtccagggtacaattcaagataccctgacctcagacaagctctccaagtaaaatttattttcaaaatgcaaaattgatataggtttgaaagataaggtatgcccgtcttctaaactgctatttcaaccttctaaattagaaaaaaagaaattgaatatcaaaagtcacttaaaccagatagcatccaaaacaccttagcaatgacagggtttgaaaggaattcccaagtgacttcatcttccagagaagcagttcctagatccatcattacgtctctctggaaagctgcgcagctctccagcttcagtcaaggcagttcacgggagtgctgcttatagagaccaaaactagccaagactagggaacatttgctttctttttttaaggggtgaattgacgtttagcataaactactttatggttttgatgttgagagatttgtagttgttgtttcgccttgttttcatttttaaataaggaatgttttagtggggagggttcttttgttttttgatttctgaaaggatggggatactgaagaactttacacatgctgtgtaatatatagctacatattcatctattcctttgcctcagcagttctgaaagagtagtctgtagaccctgggaatacccaagacccttttgccatccacaaacagtggtaccactgtgctagtagtcattatattcttcaccgtcatgcactaggtttcatttaagaatgtgcatgaagacaccataaaactaatgcttttattaaaacttgaaccatcttaataatattttgtatttgacaaaatgggaagtattaacatacatataaagcagttctgcataccaaagtgcagtgattgtctcaaggaatggtgccttctggattgaaccagagactgcagaatcatgcatgggtaaaagatccattcaaagtgcaaagtaggctgggcatggtggctcacacctgtaatcccagcactttgggagcccaatgcaggtggatcacatgaggtcaggagttcgagaccagcctggccaacatggcaaaactccgtctctactaagaatacaaaaattagccaggtgtggaggcgcatgcctgtggtcccagctactcaggaggctgaggcaggaaaatcgcttgaacctaggaggtggaggttgcagtgagccaagatcatgccactgcactccagcctgggcgacagaacaagactccatctcaaaaaaaaaaaaaaaaaaaaaaaaacgcaaagtacaaagtagactgatggattttaatgcaataaagtacagaaagttcattgatatagtttcagattccacactggcaaccaacctttaagaaactacctctaccactttgagaaactacttgttggccaggcttagtagctcacacctgtaatcccagcacttcgggagcccaaggtgggtggaccacttgaggtcaggagttcgagaccagcctggccaacctggtgaaaccccgtctctaccaaaaatacaaaaattagctgggcatggtgacgtgtgcctgtaaccccaactactcaagaggctgaagcaggagaattgcttgaacccaggaggtggaggttgcggtgagctgaggtcacatcactgcactccagcctggacaacagagtgagactccatctcaaaaaaaaaaaaaagaaaagaaagagaaggagggagggaggctacttgttgagttttgatgtagtatcaaagactatccacaattattggaaaagattattaaaatagtcttcttctttgtaactccatatcactgtgcagctggatttccttttatatttcaaccaaaacgtgagaatccagctgctttctattaagccagaaataagagattgtgaaaacccaaacaataccatttttctcacttatttttttgtttgctttggaaaatacttttcagaaaacctgtcatttatattaccatgtgttaggttttatatttatgataatcaatacataattttaaattttctgttttaatttctaatttggtaaatattgatagacataaaccacataaaaactttttgagaccctcaataattttttagtgtaaagagatccatagaccaggaagtatgagaatgagtgatttacccaaattattcaaatgctgaacatgccttgccctgatactgcttggtgatttacatacagaacttcattgtcacttcaaaaccccctcaggttaaatagcttcactcgttttagctaaacagagttccatagggattgattataaataacccaaaatgacacaactgttaatagtaatagaactaaacttcggtgtctccaaagctcaccagtaccactctctgtgtttcatcccatactttattctaatacagtttgcccttacatatttgactctgaataaacgttgaatatgtgcatgcatcactgtattatatataccgtggatttttaatttttcaatggtatcaatgatttaattattcagctcttgcttattttcacttgattttatcagtactagaaatttttgtgcatcagctaccacttccttcgtctaaagccacatttgaaggcggccaggtgcagtggctcactcttgtaatcccagcgctttgggaggccaaagccagcagatcacttgaggccaggagttcgagaccagcctggtcaacatggtgaaaccccgtctctactaaaaataacaaaattagctgggcatgggggcgcacacctataatcccagctactccggaggctgaggcacgataattactagaacccgggagcggaggttgcagtgagccgagatcacgccactgcactccaacctggatgacaaagtaagaccgtctaaaaaaaataaataaatagaaataaagccacgtttgttagtcattgctaaaataacaaaatactttaaaatatgcccctatactcagccagatcctcaaagaaccacatgcctgaaaccatactggtgttccttggccctctgtgagttgcttttatgaatcccttttggcccaatgccaacaactttattgagagatagtgagaagattccctatgactctcatccatattgttaacagagttctttattacgatccagaatgccctttcctgctttgtttgaacaatttgttggattttttttttttaatcttgtggactctgaaaattcgttaacaagtcggatttccttcttcaatgttgtcttttgtggcctatctttacagcagctttgttagcactcaagagtgtttggggttgtttttttttttaatctcatttctggctccattgtgtatcccttgatttcccttccttcgttcaaactttctgaatatctttgaaaagattctgaaagaatctcattttcctttctaataggcctctccttttcgtacaggtactgcatttggaaatgggaaaacctcggattatctgctactgggaaactttgtgtacactgtgagtgcgggatgtcggtctcgtttgcgtgtaaaatcaaaacctttcatctgtcctcattttatttttaaatttaaacgtgatatgagtgtttctggatttaagggttgtttacggttccctttaaaaattaagtaagacccagggcttataatggggtcttatttcatttttatcaaataatgaaataaaataactgaatgataggaaatcagtgccgttaagtagcagaaggaatgaggttttgccaaatctggggggtctcctttctcttggcatcaacccaccgaagtagtaaaagacaagcaaaagtatgtttgcaggggctggtggctccttctcatatgacatgaatgcgaaagcagagcagtgggtagaaatagatcagagcgtatgtcatggatgtctcctggggacactttacagtatccaggtctcaggagagtatttttctttaatttatttcaaactatatctcttctctttttttttttttttttttgagagggcgtttcactcttgtcgcccaggctggagtgcagtggcatgaccttggctcactgcagcctctgcctcatgggttcatgtgattctcctgcctcagcctcctgagtagctggaattacaggcgtgtgccatcacgcccagctaatttttgtatttttagtagagacaaggtttcaccatgttggccaggctggtctcaaacccctgacctcaggtgatccacccacctcagcctcccaaagtgctgggattaaaggcatgagccaccacacctggcctatatctcttcttttagaatgtttggatcacataaattaatttttgcatttagtaagttttattttaacaaataacctaaattgccattagctatcctgctgagaaagctcaactgttcttactgtaacctgactttacaaccccactgggaagtgtcttatcacatgctgtgtgcaaacccttaatgtgccttaaagtagaactgggcacttcaagcatttattgatcaagtgctagcaaacatcacttccatcaccacaactatcaaaggtgcctagggtttccttgacgactaacaatatttaagattgtattattataaataaataatattccatgttaatcactgttctgagtattttagagttttactctcaagaaaagaaaaaaaaaatctctgtaagattggtaagctttatcagtcccagtttacaagtataggagtcgagacacagagacgtgaagtaacttgctttgttcattaaccacaatagctaagtgataacgtcttgggcacaggtagtctgactccatggcaagtacacttcataattatgttacactgtggaaaacacagagcaattaatccaaccccagtttcctttttcagaatgactagcgtaagccccagcgatgggtgcatatatcatggagaaatgtctcatgtcctactcagcaaggttttaagtaaagttccagagtaagcatttagatttctaaatgtctggttattttattcattaaaatttgtctttaaaattcagaaagttggacttttaatatgaaaggagatttaaaataaaggtaaagtaagcttgaaaactcaaattaacccaggcatgtgctgttgctgttcatgaattgtacaaaaagcagaaaacacatacagaggaactcgtggatggagggtcaggctgtgcaggtgagggagaggcaaggaagccggaagtgcagtgctgccctgggcacctctgacctatcacagtcccgtcagctgcccagctaatttacctgtctctttgctggttggatatacaaagcaagcagcagtctcctagtcccatagttacattcagagatctctgttctttataaatccttcagtcatttgatgaactttcatgtttatgaggtaaaataacattttccccttctgttttagtttgtggtgataactgtgtgtttgaaagctggattggagacatcatattggacatgggtaagaaaatatctaaccacaaccaagaaatgtcacatttacttgtgcattatctccagtcttggtggtggtcttcactctaacttgatatgtcccaggttaatatgtcctagtccacaggttttcaattgtggggtgtcaggggtaggggaaggagaactggaggttttagttgggaaatactgagttaaacaaacttaaacaagtgcattaccacaagacttctcagagcctttaaagtattgtcatatattatgagtatcccaggaagtggtgagactttaaacttacggattacaagtcttttcttagaggtgtcactggactggtgttctgcagcaaacccattggaaagtgattctgaagactgaaaatattaaagatttgtcctcagacattgacaaatacccagtcttgttccattttagatacgttagttttgcggtgtacccccgtccagtagagaccccggaaacaaaaagacattaaagtttcatgtccctgggaaagattgccacaaggcgtttggatttaacagccatcagcatacatataatattctcacaagggtctgacatgtttcggtgagagcatgcagaccaagagtaaggcaggcttccaaatgttcaggggtaaaaaaggtaagcgtaagaggagaaaactaccaaaaaagctagaggaggaacagttcgaaattccagtaccacaaacattgcaactgttgtagaagagattagcacttaaagatccaattaaaaaacacacacaattaggtagaaactcctatagataatatttttatggatataataaaaagttaataagggaatttgagagagtttcattagtatttgtgtactcggtctacataaaacttttttgactcagatttccttgctctacagttcagccacatagcgatatgggggagcatcgcactctgggtggtgttttttggaatctactcatctctgtggcctgccattccgatggcccctgatatgtcaggagaggtaatgtgcgctaataactcacaatccaacaaaaccttaaaaactggtattttttagcaaaccttaatcgtttagcataattttccatcttgttgatttatattaaaataggatttgaccatttaaaagctgtttttaaattccacagtttcgagtgattaatcttgagagaatattttaaacttgaacattttacttaaatctgacttaccttttcataaacataaccaagacaataaaatatggttgtcgggagcttgaatctcgttaagaatatccatatagaagatgccattttaaaattacaccataaagccacaaatacattttgattaaagatttggggaaatggtgagtttctgtctggggacagtctatcatttcttctgttatctcttattccagagaaaaatctgctgtcactagattaaatgcactttttgagttgtcctaatgacatcagtttggttttcattttgaaagaattagggcatctgacatttcagccttatcatagtccattttcaattctgtctttcagtttcttgttacacgggtaggaattgagttattaggtgttcatgggggagtgtcaaaagatctcctttccttctgaagagattccagcagtaggagggtttatgatttcaattgcaggaaatttgacataaaatgtataaaagtaaatgtggaaaacattttgggatttcctgtgacctcacagtaacttgcaaatcaaggtaatgtgagctccgtgacagtacattgttttaccgcagtcccaggaaccctttccagtggttttcatgtatttgttgcccctaagtactgcctgagtacctttcacttttgacagtctggtttatagatcattttcatgaaattttatctgacagcatcctgctttttataaattagcagaatgcagacacatttttaaaaatttgtggttaaatttattagagagaggcattatatactattacagcaaaaccagacatatcaaggagtatatacttccttctacaaaaagtgaaggcttcttttgaaacatatattgtgaaaactagaaattttaacagcatgtattctaagcagaacagggagaatgccgtgagtgggtctcctctttaccttggtttctgagtccttttcctgaaataaaggaatacaactgaaggaaaaaaagtatgtgcatgtgtatgtatctgattatgacatttggaaaatttaattctattctttgtttttatctgatgtgctctgtctcattggacctgcctttcccttaggtcgattttaacttgatatctttttcattagacataagtctttgccttcctttatctcatttcttaatgtttattttattttcaaaatgaataacacaaaagatttgagacccagatggtttaagcaagtgtggccaataggtttgatgacaagaactgaggttttgaccacctacttctaggacaagtgtgaagtttgactggctttttgcccaccaaatataattctacccttgcctgtagaattcccagtattacccaaacacaaaacttaatatcgtctcttgagactcatggtgatgctgtgtttaattcaaagtgaaatgaatgtcagtactccatcacatttctgttcacttcagatacagtgggaatgctaacagaggttcttttcttgttgttttattactactgctactctgaatatagtgtttaaatagctggtgctccactgaaaatatgaaaatggattaattcagctgtagggtaggcttgactagcacgtccaaaatgtctgtttattcaaacaaaagaagaatactttaagtttatgtagcactttagtgctcccaaagcattttggtgtgggtatggatgtgggtgtggtgggatgtgggtgtgtgtgcgtgtaaatgagcctcacaataatgccaatataaggatatagtgagaatgccactcagattctccgaggtaaatcatctccatttactgtttcttgggcattaggctaataagtcccaaaaaatgttgtagctgtattcaatttctaacatttttattatagatatagggtcactagttatgttacattacaactcagttaatttcaacaagtagtgactactcttaggtctatatttttctaatcttaaaattcttatctcaatcaagaatatagccaaatatatacatatatatacatacatatataaatgtgaaagattcatgtatgtgccaatatttatatctgtaggcatatacataattggccaactgtcttaaagcttattcaactgttaactttcatagcaatatattattgtaatatattgtacattacatatattatctattgcatatagtaatatattgtaagtaatgccagcataagttaaatgttagcatctgctgccttgacatgtttatgatatccacgtaatgaaacacggcccagagcagccccgagaacttgaggccgttctgcaggattcctgatgcagggtgtaggtaatttctgtcaccaccactaacagggtcataagtatctaatccaaagatcatatccccaggatcccagtcctttcctgtgttgatttggcagcaattccttccacactaaataattaattatgtacgtaagtgtgttttggttgcccaaaagcttaataagggtctccaggatggtaccttgtagaggtggagcagacagagaatagcagccctgttctgctctgtgctggttcaggaggtattttggagagtgagacactgtgtggttctaaagggacgttgactgaatagaggagctctataaaaaggcaaccaagatctgggaagaataacaccaataatacctcatgaatattgaacgcttactttatcccaggtagttctgtaaggactatatatatattttttttcaatcaatcaatccaacagctattgagattcttctgtgtgtctgacgctattctaggcactgtggattcagtcctgaatgaaacagacagaaacccatgccctcccatagctcacttttctagtgcaagggggcagaccataaatacaatgagtaatgaaatatggaaatgtttaagtgcctagagaaaagtacagcaggtaaggggaaccaagagccatattttcagttgtgtttcccataaagccttgtggcatttactcatagtcagattaaaaaaaaaaaaaaaaaaaaactggaggagcttgagagggaagtgtcatgacctgatttatattttcgctgtaggactctgactgttgtattgcaagccgcttaggaggctattccagtaaaacaggtgagagatcatggtgtgtggggcccggagggcagcagtggtaagaagtggttggattctgaatacagtttgagggcagagccaataggattgatggacaggttggatgtgaggagacagaggagaagtcagggcagactccgttgtgtttgccatgaacatcaggagagagtgcttgtcggtaactcacatgatcctcacaccaaatgggttgccatgatcaccactttacagatgtggaaattgaggcacagagaagttaggaaccttatctgacatcactatctgactcatagtggcagagataaggtttcaacttcgatgtctgatccccaggtctgctaccttaaacgttgccctgtgctccttctctgataatagttgctaagaggaatgcatggtatttgatctggaaattagaagtctaaagggaccctcagtcctcgcaggtatttcagggatttgtaaaggaaaggaaatctctgtattctgttttactggcagcactacctcctccatgttcttctctctgccatttcctctctatagacattgcagcggtcttgttcttcctcagtccttcttccacatcagtgccacagtaaccatttcagaatgcttaaactgcttctcgagcgatgactgtatcttcatttctttcctcattcactcagacctaatggtgcggggcccctagtgccccataaatgagtgttaagtgattggcaaataacattttttgcttgcttccgtgttttagacaaacaaatgagaaacagtgaaatagaggttatagagaagcagctttcagctcacataagtacatctttccaacatcttgtgatttccaacacatgaagattttcagcagcagaacaggatgctggtctcatttaactaatccttcccaggccaggcagatgagctcccagccactgtgatacttaagcagcactacattctatgcctctgagtttgtcttccaattcctaagagtttctcttgtatgcctctctttactgcgtccacttcagagaactatcttaaaagggcacagatattttgctctagttaacaggatctcggggtgcaaattatacaaattcagcaacttacaggtacaggtctcatgcttctatattcagcttcatgcagattcacacaatcaggactttatagtcatttccaacttacattcttgggtcatctttgcagcaaagacagagccatttctctcaatgtgttgaaagaaaatccttgctccctaagttggggagggaagggaaccaacatttattgtgtacctactgagttctccaggcgctatgtttaatgccagatactccttgttttcgctaaactcatgttccaaatctgtgtagtaagcaaagaaatagccagtgacccagagaatttaacccaggtcattcttttcaatcccattggtttctgctagcatcctgaggaattcagtaccttctttttggggcccattgctgttccgtactctcaggtgataactctttttgtcttgtagccatcctccttgcattcagtccatctgccatttccccgcttttcccagggccctgaacaatttctataagctagccagatatgaaagtgctcccatctctttaaaaaagtgcccagagttataattcccccttctcaacacccacctgactccctcaaccctatttagagaaattccatctcacttcatatcctagcctcttgcctcttcttaacagcaatattagcataaataatacccattttgttaaaaaaaatttaaaaaaactattaaatagaaaacccagtcatcctacatcatcagaaaacgaatggttgccactcagctataatagggccccattgatgaagggccagtcactgttagaggcacttttcatgtagtcactcatttaatgttcacagccacactgtaaggtaaatccttttagacatttcacagacacaaagtgaagacacactttctgaaggtcaaacagctccagagtatctgaactacagtgtgaacccagcctgattctgtcccctgatgcaccgtgcacactcctgtctgttccttttccatttcttctctcatcttttctttccccttccctgtggcttttctcccagacttatcaactttaatttaatgcccttctagcatcagtgccacccatcgaagtacttagttccatctggttgatgaactgaccagtcatgatgtgcatatactatttccatcttcagctgtccttagctgcctttgtctctgcccagaagttcttttcagggcatcagatagcttttccccttttgcttccgctcattctgcatgcctgaagtgaccagaaagctattcctcaaatatctcagagtttagtgcagacttggttactgtagacccagccgagagttggttgttctcagttggtgggcagggtgttctcatttggaaaacattcccacctatagttttgcactttgtttccactacagtaattcgacatctctacccatgataatgattcaaatgataatgattaacaagtgtcccacaaccataaattattgaaatatttaactgttcaaaaggaattacgatatcgggggttaggggcagtgggggtaaggtagacaattggaaaatgcaacaataagaaatcatttaggaaaggaaaaagaaactagtgtgacgaacttggctgtcgctttaaataagttgctgtcttcctctcctctcacaaatatggttgtgatttaagaggagaactttttttcagacctgacttgtattttttcacaccagtacaacaatttatggggcaaggtaggccctggggaaaagtgctatgttatataaacatatgttggcctgcttttccgactcgtctaaatgatgttactgagtattttttgaatttctaggagaaaatagtttagccaatgattaataaaccagattaaaaaataaaaaaccagctacagcagggatcgtttcatatcaggattaataacagaagcttagtatcagcaaaacctttaaatttattgtggcattgcagacaggcactgtaaagtcctcccgagcaccatctgtttctgctctccctggcctaagggatctataaaactactgaaggaaattgaagttaaggaacgagcatgtgttttacagaatttcagatctcttgattgaggtttgtaaaggctttctgaaaaacaataaaaatctttgttgaaccctttggtgtcagccctgtaggaaaggtattaataaactacattagtgatatgattttcctaaattgtgctgttgcctattttatccaacataataaattacttttcatatgaggaatttcctggttaaaagagtctttattgatctatcagcttttaattacctccgtagcatgtggtaatttattggtcttaagaccaacccttgttgctgaggtggggcagtgttatgatatgatggagtttcatctgagattactgtgtttagccaagtagcctggagggaacaactatgcaaaattctgtcagatgttcttcaatgagccaatgactgtgagtccatccagtaaaacctgccattggtcacagtcctcatgcccccaacagtaaatgaaacaggtagaccttcattcactgttctaaaggcagctggccaagagccacttccaagcccattttgtaaagagaagtatatatggaaatgctgagaggaaaagggagacatgggtatgacaaacgtaatcgtgaatcaggacctctgaacatctgcatacactttacagtgagagctctccttagagccattacgagaaccagcattgtgttttgtaaccacagcacctttgcctgcaatatacggcaagtgtagatcgagcgtctaatgtgtgccagggcctgtgttaggcactggaggatgcaaggatgaatggaattggccttgtcctcaaggatccctttgtttaatggtggggcattgatgtcataaacgagagagaggccatggtgtacccgtatgctacagtgatgagcaacgtatgaaagctgaacgaagcctgctcctggtacggcacagctttaactattcagccctagagtcaattcattgtcgcattcattcattccataaatatgtgttgaggacttaattggtgccaggcactgttcctcaataccaagttaattgggcaggatccccattgcctaattgagggggccagggaatgggaaggagaaacaggtactaaaccagttaacaaatgactaaatgaagaataagtaaagataatttgacaaagtgataagtgacgggaggaacacagaacagatatgataggggacaggattataatgggtgttccaggaaggtctttctgaagttgggacggttaagctgaaactcacatgatgcaggaatgaatacctgtcatatgaagaagagcatttcacgctcaaggagtagcaggtgcccattctccaaggtggcaacgggattttccatccaaacacaaggcccgtgactgcagcagagagagctggagagagcactgtgaggtggggtcagtgaggtgggcagagggcggactgcctctctgccctccaggcccagcattctagtgtgggaaccaccacagtttttgtttgaatgacaggccagaaatactcatgaaagaaagtatgaaagtcgttgtgccatctgtttcaataaagctcataactggagatagtttgtttttttttttttgtttttttttttttttttttttttgagatgaagtctcgctcttgtcccccaggctggagtacaatggcgtgatctcagctcactgcaacctccacttcctgggttcaagctattgtcctgcctcagcctcctgagtagctgggattacaggtgcccgccaccacgcccagccaatttttgtatttttagtagagatgggtttttgccgtgttggccaggctggtctcgaactcctgacctcaggtgatccacccatcttggcctcccaaagtgctgggattacaggcgtgagccaccacgcccagccaactggacataattcttgcattccatcatatggtaaggtaaagggctcgtcaatgactggtgttaagctgctttgttcaaagttgtcacttaagctccctagcatgcatcatccaaagcaagttactttatggcatatttttcagcatttaaaaaagtaactggattaaacaagataaaaacgtatttatcttccatgtaatagaagtcaattgggagacaggcagtccaggactggtatggaatctgcacagtcgtcagagactaggttgcctttaacttactgtactgccaaccttagtgtacttcctcagtctagaatggctgtctgagctctagccattttaccaaccttccagctagcaagagagggaagaaggagtaaccctttctatttgaggctccttcttagacattaccaatacgtttctacttagatctcattgaccaaaagctaatcatatagccaaagtagctgcaacaagagagccagagggatgtagcctttgagctggaggaaaaggtgtccagccaaggaccaaagtgattgcatctaaagaagatagagaaaggagatagatttgatagaatgaagggcaactaaaagtctcagccatgtaagtcagtttttctatgtaagccatataacagctgtttttctttagctaagtgctttttgaagttttgaggtatttaaaaatcattttctacagtcttgaaatgcaggttattgtgttttacagactgatttgtaatcaaacaactgatgctttatgagatggctttttaaagatttttttaaaaaggtaaaatgcagaaccatcacaaaattataaaaatctgtaagaatggtgtaacaagtaaatatattgaacactgagatatcataccctgtctcatacaacttacttaataacatcatagtattttaaaattttgtttctcttaatgaaaaaaattttttttactaatactgtcctcatttttctgcgacttttaagtttttaaataggacaataatgaagattaaaataaaacgaattatgtttttaattatcttcactattctgggaactatattcctagagaatagtttcagaactgcacattttctagtgctcttgatgcctttttagaaagactattttcttttgcatgtttagttctcagtatgcattgatatatagtcaaaaaattttttataaaaattaacttctagtttatccaggtcccaactagctcttcctcctttccctctaaacaccttttttaatcgttttttttttttattactctcttgccagagaacagagatgcaaagtttctttcttgtatcatatggctagattgagtattggttcttagcccccacgagatgataacccctttttcagctcctcatcaccccagagaaatgtccaaaggaaagaagcacataaatgctgtgagctggtatctaatttgcatattttctaagatttgtgtttgtttgtttgtttgtttgtttgtttgggataacccaagccaagagttttctttgtctctgagtaatcaaaagctgctgagaataattgtaaacatattggggtttatctgaaacaccctttagttattttctgggtgttctgccctgtctagtttcgtggagaaagtaaccatcccatgtaagagcccaattcagttcaattaaactgagatttatggagtgcctatgtctcaggacctataccgggttcagtggatcaaaagtttcaaaaagagtccattctgaagagctagtttgtcatggagtagtcccacagacaattaggatgtaagacgctagctgttatgctcataatgcacagggactaacagagaagagagcgctggacgcccaagctgttgtttggaaaagtgtcttggtactactgttccccaagctgtccaggaaggtgggtgtgaaaagagttttccaggtacagaacagcccaagcaaggagcaagtgtggtgttaccaaggcagaaaatgattggagctagaaccagaaagttgagcaaagaccaggtcacaaaaagttacctgaatgtcattaacatcattactgtaagtcatggcagacatcttttcattacagaatatacagtattccagagagtaccagaagccatagaataaagatttgagtcagaggaagtgataaatgctattgataaactaggaagtcatgaagataattatattttgatgtgaatatatataccatataattgaaatttgcaagaatttttttcagctaaaatgaaagacagtaaagttagttcttaatgataaggcccagaacagagaatttggcatttgcactcctttgtctgtaggctttctcagagggaagtgttgagccagactacccaagatgtgcagctactgaaggattcagtgggacttctcttcatgccaaggttcatatgaacttagaatttgtctctggttaaagtacaaggtggcaaattcaccacttactgctcatccagggatgcttgcgtaccacccagttcaaccccatgcccaactaccataatgaattcagactggaaggctcgggcctctgagaaagagtccaacaactttatgacctctgcagtgtcccaccatggtatttcaccagcctggaacacaaagacactttcagaagtgtttgcaagttcagattctaatgacacttttcagtgtctgaaagcagagttgattttgatagtcgatgtgaagttcccatacatcagtggtagcattgccagcagagaggactctagcattctactgatatatttctaccttgccataaaaatatagatattaatattgtggattttagcttttaagatactctagagtatctttgctgtaaaaatatagatgttaaagttgtggatttctccagttttcggggtactctagagtaaccctggagtctcaggtttcatgaataagatcttccagtccactgagattgggtgactgagaaaaggaagtggaggagaaaagagcctattatgggtaactgagattgggtgagatgagactgaaatgggaatacagcaacacaaaatgcaccttctccgaagagatacctcgctaatagagcatagacaaagcactgcggtatagcaaggaggaaagagccacaatgcggttggaaagatcaagaaaacttgcatgaaaagaaacaatacctgcaaacttgaagctaagcattgaagatttttattgatgatgatttcacgaagaagatgcttcctgagaagaccaaaagagttaactgagacctaggaggagacaagagaaactaaatgacctcagaccatggcagataggttttaaaaagagaaatgtgagaggtgtatatgtttcgggggatcatggtacaaatcatctctgaagagttatgctaccaggatgtttcagaggggtcagagccagaaagaaccattgacttcttggatttggcaaaatcctaggaaatacataatggatttgccacttttggagttttctctaacttgttaactcccttggaaagggcctaaatctttaaagataaaatagcctttttacacaaagaaaaatgaaagattccattcacagcaacaagaagaaaccttaccagttatgtgaatggttagtaggagaaaaactagaaaatttgacaaaaatgagagaaatattttaaaagttgaataaataaacataccattctctgaatagaaggatcattaaattgtaagttcttcccaatttgtgagccatttgggggaacaaaaaaaaatacaccttctcctcttgattgtaatctagtctaggaaaataattataaatgcagagaaagagattagagtctgactgaaaatagaggcattattatactattttgagtgcttctcatatcagtaaaaattaaagttttttcctctttaaattttataataaaaatttttcaataacttagtaacttagtcgttaaatcaataatatatttcaacaaatatatgtcaaagcgctattctagtttctgggaatacaaccatgaaagaaaatctctgcctttgggaggttataatctagagaagaaaaacatacaaacataagtctattatacagcaggctggactgtgttaaatgctctggaggacttgagtgcaggggagaggatggggtggggtggggtgctgttttcaatggggtggtcacacaaggcctcactgtacctgaagtgttgtgaccaggacctgtggctatctggaagaaaattccagatggaaatagacaaatgctgagagcctgaagactgcagggtggtggaagctgaatgagggagggggtgactagtaaaagcactattattcctaacaaactaatgcaggaacagaaaactaaataccacatgttctcacttataagcgggagctaaatgatgacaacacatggacacgtagaggggagcaacacacactggggcccaccggagggtggaaggtgggagaagagagaggatcagggaaaatatctaagctcaatacctgggtgaggaaataatctgcatgtcaaacccccatgacacaagtttacctatgtaacaaacctgcacgtgtactcctaaacttaaaagttggagaaaaaaaaaaaaggcactagcgagctggccttcggagacagggctggggcagaacacccagggccatgagacaattgtaaagactctcgatttttctccaagtctctggagggttgagccaaggagtcacgatctgacttctaaaaggactgctctgggggctctgttaagaatagtatgtacagggaacaggcaggaggccaggggacccctagcaggctgttgtagcactccagacagaagatgatgggggcctaggcaaacgtggaagggcgtgaagtgggtagattctggatttggggtggggagaggatttgctctaagaatcttttttttttctttttcatttaaatgtttttgttatggtagaatatacataatgtatttatcattttaagtgtaaattcaatggcattaagcgtattcacattattgtgcaaccatcaccactgtccatctctagaactttttcatctttccctactgaaacctcatacctgttaaacaatccccattctccttttcccctaacccctagcagtcaccattgggcttgctgtttctgaatttgactattccaggcactgcatctaagtagaatcacacatttgtccttttatgtctggtttgttttatttggcaaaatgtattcagggttcatccatgttgtaacgtgggccagaatttcatgtctttgaaagctgaatgatattccattgtatggatatgccacattttccttgtccactcatctgttgatgttgtttccaccctttggctatagtgaacagtactgctgtgaacattggtgtatggatttttttaagtcaagccaataagatttgccagtaaattgaatgcacagtttcaaagaaaaggggaaacaaagatgacttgaggattttggccagggcagccagaaggataaagtttgtatttgcctagaggaggaagactggaattttatattctgcttctttttctttaacttagcaaagtgttcatactgtgtagttaattaaaatctttgttaatgctggtacttccttctcttcctgcctattctacagctcttcctcacctccccacaaccacaaaaaaaaaaacaaaacacttttatttccaggtatcatacctttcttggattcattgaaatacttctgatgattcagactgggagctggggatagtttaacatatttagcttttaatgcacactcgtcaaccttcaacagaaaaggcagcctacattggaaaaggatagtcatggagctgaatcaactcctctccccaaaatacgtaattatctggcaataactctccctagaataactccatgtcagagcacaagaaaaccaagcaaaccataaccaccacatctcaagaacagggtccccaggctctgtttttcatagtttctacaacactaggttgtgagaacatatttatccagcaattatttattgaacatctgcttggtggttaagcacttggatcatgagaattaagagagtatatagtctaacaagaggatgaatgagcaactagaaaatgggtgataggtgccaacataacggaagcccaagtagtgtcctctgagtctaagaaaggaaaattgaaggacgagtaggcatcacaggtgcaaaggcctgaggacaagagtgagcatgggcgctttccaggcatcaaaacatgttatgtgtagcaagagatgggcctggcttgagagatgatactgggaaagcaatcagaagtcagataggaaaggtcttgaaattgtattaaagattttgtattctattctgaggacattctgaagccacagaaagggtttaatccaggaactgctaacatcgaatttgccttttggaaatatctctcaggctgcagtgtgaacagctagaagcagagtatttctgaagtcagtacagctaggaggacaggcaaattatttggactgggataagcaaagttggccagagatggataaatgtgaagatgctaaagcacaacagaacctggtgaaatattggacacagggtaaaaagccaattcaggaatagggcccaggtttctgtcttgggcagccagggatgatgccattccctgaatagcttgtaccaaggaagagcagcctttggagggaagacagtgtgtgttcagtgtgggatgtgtgaggtttgaggtgcctgtgcgacccacaagttaggagctcagtagtctagcctgtgcttcaagttcaggtgagaaatctaagccacaggtgattagtggctgatttccatatgaatgatgatacaaactgcaaacccttccagggagggtgtttgtatgctaacagaaggctcctgggagaataccagggtagtttacgtttccctccaggactcttctaaactatcagtcttctgataattacaatctgtgaacagcatcttcacagcttggataacattcagaccgagggatgcacatttgcctaatgagccacatagtgccctgttagctttaactagtattttgttatttataacaacccacaacgaatatttgcattccccaaaattagttgtgtgggatgtttgtaagaaggatgtaggggaaagtgttccataatcaatcaatacctttaggaaacctgggtttaaaaaactattcagtagggtgctttactctgacttcttgaagccttacgctgctctgcgctgtgactctccaagaggatgctgccatggtttcttttcacctttactaaatctctggccatgggcccttttcaggggatgctttcaggactagcaaccacaggacagtttcatgagatactgataagcaaaagctggacttcattttaacacatagttcagaaattgaattatcgaattaaaaggaataaatgtttgtggtgttggtgcacattgccaaataccttttccaaaggctagttcattgctggtgggaatataaattgctacaaatacctattccaccatacacctctcactccaccaaactgatggtgaatttttaaaatctgatctaatttgtcagtgttctctaagactgcagagtgacttaacacttttccatgttgttaattacttgctgctgcttttatgaatacctttccaggtctcttgcctatctcttgagattgcagctattcttatgaagataaatgggctatttttctggtcagatattaacccagaatttcatgtatttgtagtagtcattctcccagttttttattgtttacttttttagttatgtttctttgaacacgtggaagttctacgttttcgtaaatcagttctttaaagcatcctttcatagttttttttcactgtttttaagctttggaagccttttatataaagctttgtccagacacttaataaataatcacttcttggttttttgttgttgttcccagcgttaacgcaactactctggaagttattcatttctcttactgcactcccctccaaaaaaatgttttgaagcactattttccaaataattttcccttccaaaattaatatattatgccggtgtagtcaataatttctatgacaaaattatttttctccattttctaaattggcaaattgagatgaatggcactttattagggatctcttactttggcctatgtttcatcattgcgttttaaaaatagcagataagacaagcgtgtgctgtgatattattgagatgaacatcataaaatttataaattgatttacagttaatttgatattgtcataaaaatttgcttccatgaagctcatgggacagatcactggaaagaaccagagacaagagcatttaaagaaatttgacaattgaaatgaagaaagtttgttaataatcaatgttatgcagccactttacaaacattattgagtttaattcctacaatccactgtacagctgaggaaactgagactgagaagtttcttcccgagtgtctgattagctgggaagggccgtgccaggaccacttccaggcctatcaccagacctgctccaactggggtccatggagacagtcttagagttctgcaaagggccttctgttttagatgtctatacatttccatgagtaagagtcacagcatgccactctgatattaatagtgtaaacacatagaggtagactgaagaaccatgccgttagtttgtaggcaggtggcacacttgaattctctctcctatgagactgaacatgggcacattgaaggtgaagaagggtttctgtctggcgtgggaacgtaggtgctaacagatcatgccgttgtgggtcagaaggtaaacccctcttatcggtcatgccccctgacttggccaaatgcacataaactcgtattttctcaaaggtttgttccctgaaagttcacatagaaatttcagaacaattcctcttctgcaagttgtgttttcaggcagcgttggtttatttttgaagccccagtggttcgattttgagccggcatcactctgcagagacaagcagttgcttgttcgccacacacggcctgtgccctcctgttaccagctttgcagcttcctcagctgatcccttctcaaggcccccgggagccactttcgtggcaaattccatttggtttcacagtgccttgagaaggggcagtgggggccacttggcctggtgcaccagtctcccacattaggagaaatttgcaaaccgctctcggagggaaccggagctcggcccgaacaggctgctcctgttcggagcaatccaccattgtctcaggatcccttcgccttttcccagctgacctgcctgtgagtggggaaatgtgaaaagttagagacaaaactggtttcttcagagtgagggggagctttcttatacagaaaggaaggaaatacctctgtgggattttatttttccccccctcttcatccaaaaaatacaaagagactctctgtctttaatgcgaatgtcggctttaaatcttttaggtttggattaactctgcaaaagaaaaaaaaactgacaggctttcagatatgacgcagaaaaacttttttcccctcaattcatgttgttcatttgtaatgccaaaggctggtagactgaatggtggggcgccagtcactcctccattcatcgttagcatcacaatggtcagaattagcagccttgaatctccaccacttttgccttttccactggtggacatttaatacaaggtggtgaaggcaagaataaatcctccttctcttgcccccccccaaccaaattaaaatatattaaaattaagccaagtaaatgtattttcagttgcatgccttggaattcttaccttacctttccccccagaaggagaaagaaattggttttttacagttgttaccttactagaaagcttctttcaatctaaagaaaatctactgacttgatagacatttcctattacacagttattgttggttttcaccattgaggatgtcagcaaacatgtcaaagatcatgttttgcttattaaataaagtgacttttatgtgagtatttttcatcttgttggtgtctcgaatattggtgctatttcattgaacccatgtggcaaaacttattttctggaattttttgtaatagcatgtttttattttaaaagtattcagagctattcacttctacatagcgaaaaatcttagcgtccctgaacctgcggtctgtatcgataagctcatgtcaatgcagaaaaaatttaaacagcagttcctagtccttaatcgagagtccaaatgaataagtaatctgaaatataatttaaaattagaaatgtttatgtttgataaggactgattgattaggactatttatgtgtaattttgaaattgcctagaataattaaactctaggttatttttaattcctgaaccatacctgattctttttaattttgcatgatttttagtagaatctaaatgtgcatgcgttagttggctactttttaatggaattagaacaatacatatatggatttaaataggtactaaaaatttcctcttgataaaaagattaaaagaagtgaaaccaaaatatttcttttgcttttattgtataatactattccttttaagttctgtgtaatctaattatattacaaagatattttttattataattgcaaataaataatagaatttattactttttaaattacagaatcatttttttttgcaacccaaaaggctctaatacagcaatttggtatttattacaaagaaattattaaagttatttttaatacacttttatttggcttttacatacaagatatttggtttgactttagcaataacaggtatgcaccaataccagttatataaatcattgaacaaaaattaagattattactacctaatgttagccaaaaataatcaaattgttgtttttgtaggtatcttaatttgattatacagtagtcatgatttatctggataatttttaatatcctataattttacaaaagtaattttcatttgccagaaatagtaaatttagtttctaattatgatttattttacaccatatcttataagagaatttaatccagagtatattttaaatttgctcaaagatttattttgatattctaagttaatttcataagttcgaattcagagttgtatactctcttacagaatgatattcttaaaattgtttcacttaaaaatacataaaaactaaacacaaatcatgtattttttggttttaaagtaatgttttttctgacgatttacacaggcagccatgttgttcagttctggagtcttttggatgggcttgttattcatccctgtggcatctctgctccttgatgtggtgtacaaggtgtaagtatatactcagttatatacggagaaatatagatgcatattcatcctcagatttctctcttggtaacatcaactcaagcatgtagagcttgcaggatagggactggtaatattacttaattttaaataaggaaggggtgattcaggaactagaaaactagtttaaaagacgaaatgagtagtaaagcgggtagtttcagttaacagagaaaagtaaatggcactggagaaaattacatcggggagtatgttttttagaaacagccccaaaactcatataaaagtaaaagaaaaattgtactatttccaaaaacattttttattataaaaagaaatgttttgcttgcctgattccaaacatatataaaatataaaatgaaagaaaagaaaaccttactaatttttttcaagggttataaattttaaaatcttatgtcttcccacaaaaaagatagcatttaatttaattacatgatatttatttaaataactatgggagtttcaatattgtaaacctaaaccatcatttatttttaaaactataatttctatattctcaaaattacggtaatttttaagattcttttgaaaaactgcttgtactcttgttaccattgtgctttatcaaccgcgtgataataagccagacatctagttttgtaaaatcttcacagaagtatttccatgcaaatccctttttttttctttttgcagtatcaagaggactgcttttaaaacattggtcgatgaagttcaggagctggaggcaaaatctcaagacccaggagcagttgtacttggaaaaaggtaaaatacacagtgaatatattcttttccaaatgaactttaaatttatcttgtactagtggttggaaataagtgataagacttgtatttgtcagcatcaagctggcagtgtcattggcaggtttgggagtcagagacatgtggatttaaatctgtcgctttctaaactgtgcccttggctacgttgcttaatcctactgagcctcaatttcctcatcaataaaatgggggcaataatacctacctcatggttagttgtaagagttgaatgaagtattataaagaacttagcatagtgcaaagtctttaatgagcattaaataaatggcagttacaaacattattgtattattaaactgcaagagaagaaaaagacttttagcttgaaatagtatccataataaaatgtatgtaattggccaggcgtggtggctcacacttgtaatcccagcactttaggaggccgaggcgggcagataacaaggtcaggagttcgagaccagcctgaccaacattgtgaaattccatctctactaagaatacaaaaactagccaggcatggtgacgggcacttgtaatcccagctactcaggaggctgaggcaagagaatagcttgaacctgggaggcagaggttgtagtgagccgaaatcaagccactgcactccagcctgggcaacagagcgcgagactccatctcagaaaaaaaaatagtatgtaatcaaaatcatagtttgatataaggcaaattaccttgtataattgcatttgtggttcagtagttattaggaactgacctagatatgtatcatatatgaagtgaattacctatcccaagttctcttccttacaccaccccctccaaaaaaaaaaggaaagttagaaagctaatcaaatccactaaattcacaaagcattgtaagaaagaaattataattagttgcagtctataataaaagacaattattaagataggaggaggaatttattttttttcttcatttttatcatactaaagctgaggttttggctaaactataggaaatattttaccctagtatatgtcaccttaatcatgattcactgttgttatccattttgacacaatggagtagttgtcagaactcagtgagaccttggcttccagctctcttgctctcattatgctgaaggaacacatcacacaccagtgtgtgccacttttttgaaaataatagcactgacctttgttgagcgctcacttcgtgccaggtgcttcccttgcattttacgtgtactatctcactgaatcccagtaacaaccctatacagatccatcatctccatttttttccagatgaggaaactggggcttcgagagatgaagttcccaaagttgttagtgacagatctgggcctggagtccatgccagctgatcccagagctcctgctctgaaccattcacaattctgcctccttttgctgtttgttcaaaaatataatagagctgcaaaaaacagcctactactaacttgacaaagtacttaatctctgactcagcatcccagtgtacaggatgggaatgataatacctactttcagggttgtgtcctcctccctccacctttttcttcatctaaaaatttgcatcacaggattcctcataggaaagtacctgcagtttgtcagtaaattcagctagtaaattaattatgtcagttctctttctctagcgataaaaagaatacagtaagagttctggccaggcgcggtggctcacacctgtaatcccagcactttgggaggccgaggcgggcagatcacgaggtcaggagatcgagaccatcctggctaacacagtgaaaacccgtctctactaacaatacaaaaaattagccaggcgtggtggcgggcgcctgtagtcccagctactcgggaggctgaggcaggagaatggcgtgaatcctggaggcagagcttgcagtgagcagagatcatgccactgcactccagcctgggtgacagagcgagactctgtctcaaaaaaaaaaaaaaaagagttctagctcatgaaattgtgaataaaacaatgtattcgtaattattagggaaaggccactgttaatactgttactatccttagtagtaaatttccagatttgtaagtatgttaataaaatcacattaagcccttccacgtgatacttagtttgtctttttgttgtctaccaatgacttcaattcataaatcaggccagtgtaatgacccccaggtcctaaacattcagtgattccgtaatatatgtagctccttctgttaaataaaataagccagagagcccaaaaaggaaagaagtgaattccagcataaatgaccaccaacttctccataggaaatgcatcagataaattccctgctgctgcctcgctcatttgcctaaaatagctatttagtttttcctaagaactcaggaatgtgttagctatcagctgaataccagacaaaaaaccctggaccagcatgtgctccatgttgccactgccgcccactggtgatcagaaggttaatgatcagtgtaaccatagtggcttcgtgcttgatggcaggtgcccggaggagggaggcaaggggaagatctgtgaaaggagaaaaatagcaactggatggaaacatcttcatgcttaaagtaatggcactctaaggttaaagaattgttggattgattttaccccctggattattttaggaatcttggagaatgacattgatttcagatttcaaaaaaagttagcagttttttttttttgtttgtttgtttttttttgagacggagtcttgcactgtcacccgggctggagtgcaatggcacaatctcggctcactgcaacctctgcctcccagattcacaccattctcctgcctcagcctccctagtagctgggattacaggcacacgccatcacacccggctaattttttgtaattttagtagagacggggtttcactatgttggccagactggtctcgaactcctgacctcgtgatccacccgcctcagcctcccaaagtgctgggattacaggcgtgggccactgcacccagccaaaacttagcaaattttatatctactttatcaaaagggaagaaattgtgattcttgtgaattctaatgataccagactttctttggttccaaaacaccatgttattttatatcttccagtctttgcatttgctgttcccctgtttgggagccccttcttacagactaggcactccaattcccagctttccaaacccaatgtagattcaattttttcagctgtttgcattcacaatatttaattcctagcctactatctctgtactattatactctgtttatactctgtataaacttctataggtacactgatcgcattgcattataaagtattagtttactctatgtatgtttttattttccccctactagattgagcttctagagaggcccatgtcttagtcatagctgcaatgcaacacctggtacagcaccaggaacttagtagcactcagtaaatacttgttgagtggatgaacggaatagttaagagaataaactaaagaatggatgaaagaaagagtgggcgaaaggattgctgagtaggagaaaggattgttgaattgatggttgacctgtgggctgtgaaacagaaatctgattcataaaaacatagaattgtataatttgtacttcccaaactaggtaatatccaaagcaaccatcatttacttttttgtcatacaatgatgcagttcttaagaaagatcttgtgagttgatcatccccaatttttttaatcttcagtaagtatgactattaaactcaagttgtgtataaaatgcaaatgtcagaaaaacaaattgtaagcacttaaggaagattaatatttacaataatttctcatctttgttcattttcagaaaaaatcatcttggttaaaacagccatttttagtggaaatagtatgccacctaccatattaccctgcaaattagattcattttattacattttaggggaaaaatatgtttaatcaatctaagtatgttctaaatacgcatgcttttgagccatgggttatggtagaaataaatgcaagtctacaatgatgagagaataacctaaaccttactcctgaaggtttaaaataacccaaaccttgctgcctcatgacttctaccaaagtccatgtgaggagctgagttcttaagaactgaggaaaaaccgtccactggagaaaaataaaacggaaattgtactttaaaaaaagtaaaataacccaaatcttagtcctgaacatttaaaccttatccaaaagtttacagtaagaaatgatggacactgtgggctcattggaggcaggacaattatttttggatatcattggagtatgtgtgaagcagtgcatttcataggcaaatacaataatgagactcataattcttttttatttctcactgtagatattagccagcatatcatcattggccattactaaatagaattttagcctaggatcttcaggtcagtcctcactgatttgcctggcactaccgtttggccattgtttacagcttttgcatgcagggagagtagggaatatgaggtgtcagagaactcggtggtgtagatggtgacagtgctctctctaacctttctgatgtattgttcatcttaatgaaaagcagttttaaccttgctccagaactagtagaaaggaaattttatttctcagtgttcacactcgattttatatcagtatgacttaaatactttggtggggattgaggacacagggatctgtcaaatgtttccttcagccttctctcatcactgtggtaatggttctgtccaacattcagaaagaaaagtgacagaacactgaaatgttttcagctccagggcagagataggcctgttatattcattgtttgtttctccgccaccacagctaccctagtgtaggacagctattgcatgctatacattaaacattccatgaatggatagttacgtactttttggagatttattttaatgagtcaacctaaatagcttatcaactcaatatgtagacaaatgcaaatttattcctcttcaagtttcccactgaaaattccttaagacaacacgttccaacacattccagaaccatgaattggtttttaccaacactgacattttttagtatttgaaatattattttaaacatgttatctttatattcacctccaccaaatgtttaaattgcaacattttagtgggtttggaaataaggtaacaatatttagtagtagttgtgtgattgcattaaacaaactcaaaatttacatagcttggtatgtaaatgaaagactataagagactacgtaaaactgctagtcaagagttgtgaataaaatgtggttttagtgagaaggtatctttagtgttttttttttttgtcttttcacactgttaagctgttccactaaaactgaacttttaatatatctattagtgttagcataaatatattttataatgtgccttaatagtagtatcagtatctataaacattgatggcccagaattgcatagatgttgaaatgagtagttccccaaaggtgtaagataagactagagaaatacaactcatcatcacttatttatttagcaacctcctgtgaatggcatttatattctgaaggagggactctgctctacaggactaaagcaagaagttcaaaatagctaaggaaaaacaaaacaacaaaaatctagtcattttcttagtaaagaggtagaatgagaacattataaactaaaacccatgtgcagcaacacacatctcaccttgcgcttatgttgactagaaaccaaggcatcaaaaatactccttacaaagtaccttttgtttggtgatgatctctgttctagttgattttttataataaattctcagcatcttgggggtaaaggtgggagggcccagcatttgttgagtgcttcctaagtgtcagtcattgtgctgacagctccctgcatcctcacagtctgcctgagagttaagtactgccctcctgatatataggagatgacagagaaaagcttgcctgtggtgacccagctaataagcagccaacgcaaaattaaaccaaagccctactccagagcccatgatctttcctgagtaatgtgcttctttcttaagaaagagactttcttactgctttgttttaatgctgtacgttaacttgatataaaagaagagctaatgagagcctttatatgaactgtacaaaacggaattatgttaccttatgtatttcagttgctgtaatatgaaagactaaattctcatgtctgccttcttaccactttaatattgtaatattaaagtattatgcatttaggaaggccagcctgaaacctggaaaatgtcttttgggaagaagatgctgcataatgatacattgccatcctctagtctcccgtagtcatttcggtttgaaacaccaaagactttccagcaccccatccacaaggctctgctaaggaagtcagaccacctgctgctaaagctgcgacttcctcaaagcagttacatattttagtgtccctcagggtccatgggtctgtaatgctagatcatttaaagagtagagtaagaaagcaactctgtaaaaatggccctttctcatttctcatatctgtttatttcactgacagaaacaagttttacaactatttgcagaactgctggagttttagattaattagttttcttgccttcatgtagctaatttccaatgacaataaaatatgtccaataataccagttaacctccctagactttaaaatatatatgtggaagattactacaaatgttaacatttctaaatattttttcttcggtttttgcctaaatgtttgcataattcatttacacaatgagttcattttgcagaggatcctttttttgtatatgatattgtttcatttcagggtcttagaaaaattggcaaaatacagaactaacataacacagcaatttaactaaagcttttatagtgggaaaaacacaagatggaaatttttcagctgaatcagttccagttattaaaattgcataaacatttgctgcaacacatatggattacttatttgtttctcatgcctattatgttctttaatatcaaaacaattttataaaacaatgaagaaatggcatgatttggaagatggatgatgtctataagtacatttcagaattattactcaacttcacgtattcaacaaatatttgagtttctactgtgtgagacacttttatgggaagttgggggagaagatgccttattttttacaatgtgcttttagaagttacataattatctggatttgtatctgaggagacaactattctaaacacttcctgaaaaatactttccttgttatttcacctaccataattatttttctgaaaatagtttattttaaaataaaattaaggaacacatgtcataccatattagtggtagtgaacttctagttaaaaagtctatgaaatgtcttctttgtgtaatgttagttaatatttactttaatatttttaactaaaaaatagtttataccaaaacgtgccaaatgtgaaaaaaatagtaataactaattttttattctaaaaattgccatgcttagaatatatgtagtcagtttttaaaagtgaataacactactgttgttttgtatttttttattttaattgtgttatactggctctgtgttgccatttgacttaaatataactgagtggggggtggtgaggagatcctactttttactgggagaaggattattggggaccaaactccttagggagaaaatggcctcaaaagtctgtctaaatacttgaaatttcattcgctatctgagaaaatgtgtaaaaagaatcactaggctacggatttctcgagcaatcttttgtttaagtctaactctctttggtggtcctgtgggcacactggggtctctgccgagttgataattcatttcacacatttgcacctgctctgcagcctgaccgagagggcgcaactgctcaagaacgtctttaagaagaaccacgtgaacttgtaccgctctgaatccttgcaacaaaatctgctccgtgagtatttgagtttcttatttttaaataaattctctgccattgctgtatcatagcatttatacagtatcctgactttagggatatttatttaaaactaatgtctaaaataagttttgcatatttgtaacctgtaaataacagaaaatccattggtcagaaccatttcactttcaacagaagagatagttaattttaaaatcttgctgtttcacttaaagaaaaacagtatttccacattccttgcttcctcaaatctttttctttaaagccagtaaatcttaattcttaaaagctgcccctgtcttgttatcttttctacttgaataactttgcaagagcctttcagctttcatacaacacaaggaagcatatattttccccttcagaaatatttatgaatatttagagttgtaagacattattagatattgtgccctcttaacatttcaagatctaaaaaagaatataaaatgtaaagccctgtagtaaatgtatttgtgtgagtaatatatcttttgtttcatgttgtttccacttataatttattttcacttacgtatactcatgtctaatgcttttgctctttatacttcaagaggccttttctaaagatgtgatccccttgggggccattccttatgcccatgccatgtcggggcgtgagtgagtttatttgtgatgctgagagccaaggggaatgtcctctgaaggaaggagaccacttgccaccatgagcagctatttgtgtttatctcctcctcctcgcctttttaaattgacaaacaataattgtctatatttatggagtacaaggtgatgttttgatgtacagttggccctttctatcagtgggttccacatctgtggattcagcccgctgtgagtcaagtatattcaagggggaaaaaaaaattcacaaaattcctaaaagcaaaacttgaacttgccatggacgaaatactacattgaatccactagaatgaactgatgtgagggcattgtattaagtattataagtaatctagaaatgattttaagtctacgagagaatgtgtgtaggttatatgcaaatactgtgccattttatataaaggatttaagcatccgtggattttgatatttaagggggtccctgaagccattcccacagataccaagggaccgtacatggtgggatggttgaatcaattacattattcaccacctcacctacatatcacttttcctttcctctcatccacctgacctatgtggaaatatgtgagcccacttgactcaactccctcaccccctccagaattggggaagcaaaaattagaagagttggagttgacttacgggacagaggatttaggggaattgagggtgcctactcagtcttctagagagaagaatacctagaatctaaactggcaacctaagatcatcccactctttattttgaagttaagtctgtatcttttctaggcattaaaaatcagtgtctccatgcttttgaatgtgggaaggctgcatttgttccccaggctagaaaatgaatacccaaaagtcagaataacggtggtttccagtgcctttgtgagaatttctgttttatcattaacctacagatgggtatgcgttctctcaagatgaaaatggaatcgtttcacagtctgaagtgataagagcatatgataccacgaaacagaggcccgacgaatggtgatggggagagcctgaaaggcaggctctgttacctctctaaggagagctaccaggttgtcaccgcagtctgctaaccaattccagtctggtccatgaagaggaaaggtagatctgagctcatctcgctgatggacattcagattcatgtatattatagacataagcactgtgcaactgtactgtaacaccatctcttttggatttttttaaggtatttgctaagtctttgtaaacggaaattgaaaatgacctggtatcttgccagagggctttcttaaacggagaataagtcagtattcttatgccattactgtggggctgtaactgactgtcagtttattggctgtaccacaaggtaaccaaccattaaaaaactctaaatgatatttagttaaagggactcttggtatccagacttagatttcaggatatgctgaaacaaaccagcattcttaaggaactgactcaccttcctgagcaaaatttctaaacaagcatttgtgtccaaaattgtcttgataaatgtttgccaaagaggttcagtaagtgtttttctagttcagtagtcatatgcccagaaatgtaagagaaagtttacttccagttccgctgtaagatctgcatgcctgactttccaaatgtaagagtgatttacaaaaatgaatatttcaaggcatttgctactaaaatcggtgatgttgcacctttggccttacaaatgcttctttgttgtttgtcgtgtttatttgttagaggacacacgtgttaatgtgactctgttgttatgacactgatttttcaaactatgtatgtttcaggtatttctgatgaagtttcatcatcatttagatttttctaaaaatctggctaatgcagtagattgagtgatgtcattttgtcttaaagtttttcctcttaagaaacatatgctacgtatttacgtgggatttccaaagcttctgttgcaatatttggaataacatgtcagataaatgcatgggcttttgtcctgtgttccagttcccactagagatgcctgtgtcttgtgtagcacacccagtgttatggtgactgccccctatactgaagactgaaaattatttcacagttcactcatcaaatagttcccaaaattcgtcacatgctgcttattgggacaaataggtagtacattttccccatttaaaaaatgcggattttactcaggccggtaactttacagtcagaggacacgttcatcatgagtagcttttgttagtatgttttaaaatgtatcttcagttcaattattttcagcatttacaagacatctgaaaatggctattttgctaccaacagtaaatgaaggggctgtttaaaaaccacaaccagttttctacactattttttaaataatactttcatttgaaaaaaaggaattagttttcagatacacttcagagattgaagcaaactatttgccttttactcaaaagcctgcttgcctttacatggacttaccagcaaaataggtagaactttctcttttaaaaaaagtcaactagaattgagaagaggtgattttttttcagatcgcttctcgagtttaatattttcacattcttttcaccctttttctcaatctagatttaaaattaggatatatgtcatttccttgtctgtatttgtagctccttagttaccagtatgcctctccattttctacaaataagaggttataacacatatacataattctaaccttaagggaacacacgtttacatactttacttcccaagcccttcctgtttggggtacagattgagagagtcatgaatcaacacatctagcaagaccacaggtgtaagagtctaagatcgtcttcaaaattctgaagtcccagtctttacctgtccagtgaatgaatattcagagcagcttttcctgggcttcccagtggtgatagctgaggtcaaaccacaaaaaataagaaagcaagagtgaaatgcacccctccagagaaacactttgtagtgtttaattctgttaatagagaagagctgcttctgtttgcgctcacttcatcagtggcacccttctgcagaattttaatataaaaacattatggatataatagaactggattttctgacttaaaaatgtaagttttattttaatcttgaaacgtggattgtttctgtggagctcttaaacatgagaagaatacttacggttgataatgtgtaacatgatctgaaatgtgactaatttgagcctctttgtcccatcgtcctgtttttgaattattgacattgtcagtctctttgcttcctgggtgagacttggggtttgagggacagggaatgaccttcttggtgaaacttaaaatataacattgcaattgcagtgactttacagtgttaaattagagaaaatagtctgattttttaaaccttccttaactggaaaaaagtcacatggttttaccaggattgaaataaacagtcaatgtgacttttaacatgtgtttttttgaaataaagggcacgtactcttcaattaaaaagttccttatagggactctggcaaatgctaacacagttgctttacaatgtttacaattcagacaatacgacttataatagaaaatcctcattcatttagcattgaaaagctggaagttgcttctttaatgttgaatagtatacagtggtattgagcatggactttctaaatgttttatatatacatataaaaatatattggtgtctcacacccagaaagatgttatattgtagatattattaggaaaacagtgtttctcaggaacgttgtaaattttaaatgatatatgtacttcccgtcctcccacctccactctgtgctctaatgtgagactgcttcagcagtgttgctaagttaatggaaaactttttctaatcaagtcaggtgaatgtgtattctgctaaataatgttagccatttacatgaattgtatggtcattaaatggaatcagtgattcctctttaatttccagaggggaaatgaattatggaaatcagtcagcattctgatcattaaattttatactttaattttgccgttcagcattctaaatatccaatgtgaaagtcacatgataatttgttttgcattgcgtgcactgtacaacacttacaacttgtcatttaaaatgttttctcgggaaatgaatgctagtcagaaagtaatagattgtattattcatagttttaaaattatgacaatgtcataattactacaaagctaaataatcgtgtttatttttgtgcagttgccctttgatagttcctggttttaaaacctattaagtgtataatcttacaaatagtcatctacaaaatttatggagaaagtgcccagcccattcacatcacatggaccaggaattcttttgtaaatgacttaaggtaacatcatgcagttcagtgcctaataaatgctttttaatgatgaacatttctataatgactcgtaagataccatagtctgatttttctcacattaaaataactgaagtcacttgtgtaacgtagttatactttgctgcattttaattaaccttcaacagctattaaagtggaatgtaagttaaattttgaaggaaaggaaataaatgttttccatatttcgtcttgatttactttctgtatgagaacagctgtgtttttgataggtttatggtttgcatgagttcatatttaaagtgatccaggccaatgcatggctattgctgtaaatcttgatgtttatttctgccttgtaaagttctatcacggcctacctggaatttaaaattcagtagacaaattaattggtcctctgcacaacttttttaataagtagattattttacaaagaaatttgaacaaatttaattgaatcttttgtttagcttgcctctaagaacttttcttaataaagctcccaaaacttctcagcaaataaatctcccttaagtaggaaagctagatttcatatttgcttactttgaattaacagcaactttccacaggtaaatctgttcttgcaaagatgtgagcagaatagttaaaaataatatttttatgtttcatggttctaaatggaagccataaatgcagtaaatactatctgttgtttaactactttaatcgtcattttttacattttcaagtttattaggttaagaaaaacagggcagccttggaaggcagctactacagaaaactgcagttttgcgttaaagataaagtagtattttcagctccctgaaaaaccattcctgctgaaactgctgtagaaattgtgaagctgcatgagtggagagtattgaatctgtggttatagtagttttctcaggtttgtttatcttgatgtttgatgcactgtgttttatagttattaaaattgagtaatattatttctatgcagtgttatgtgtcattggccttttgtgaatgtgcatgttttaaactgcaaattttaaacattttgtcctctaattgttattaaaaatgaaataaactttaccattacttaaaa

SEQ ID NO: 28 - DNA, 653878 bp, synthetic construct
  source 1..653878: mol_type = other DNA
gcagcccgggccagcggggcccgccgcggtggcgttcgcggatgctgccgcattggccgctgcggcacggacggcgcagcctcgggcgcggcccggcacaggcgccggcggtccccgccagctagcagcccggcgaggcgctggcccacccatggtcctcgggcggcggcccctgcgcccagccctgcgcgtagcctccgtctctcgcccggggccgccgagcccccgacacgggcgagatgctgaacggcgcaggcctggacaaagctcttaagatgtccctgccgcggaggtcgaggatccgctcgtccgtgggtgagctgggaggggcgcggcgagggagggtgggcccggggcgggggcggcgcggggcgcgcctgcggttatgcgacactgccccgcccgcgccccgctcccctccctgggctccctgggctctctgggctgcaggatccgccgacgcggcgcgctggccgcacgggggctgggcgtcgctgcacctgcggggccaaaaggctccaggccggggcgaggtgagcggcgggcgtcagagacccccggctcgtccctgtacagatgtgtgtgtgtgtgtgcggcctccctgtgcgcgtgcccgtgcgcccctacgcgcggatgcggctcagggatgcgacctaggcggcagtcaccgcgatggtgggcacggtttggcggcgcagagaagatgcagccttccctgccggcggccggcaccgctgtgctgcagagctcaaaagcagagggggaaaaaggcatccgaagggtccctcgagtgattctcaccacttggagccccgggtcctcgcgcgctcacagcggcgacgtactggctcataaccatccgtgcatacaaccatctggagacgaacacacacacgcacacgcgcgcgcacacacacacacaggtacacacacacgtacacacgcacgcgtacacataccctgcctgcaggcgcctgggtgttggaactcgaaacctaaagccaaacacgcatgtaccatacccgaccactcacactgttagaggcccgcgttctatgattatagaacacatttagaaactatgatgtcgtggagctggatgttatgtggctatgacacttgatagggttacctagaccattagttaatgcagacgtaaagaggagccccaaaaatgatttcttaccgtttcaggactgcggcaagtttgcaggtagatctttgacatgaggaaggtagagggtgtacagtttggagctggggtcacttgtcttcgtgcttttttatttgttttgagaaaataggcacataaaaataagcgacttttgtatttctgtagttgagtaacgtgagagggaagcaagcttatcaggtaatttaagccaatgtttgttaaacttgggtaaagtcaggacactttcacattcattttgaggagaatcccagcctgaaggggtcacggggtgcagggtcaagactaaatagcagggaagagctgtggcagagagacagtgggagggcgcagtcatacaggtgtgagaatttcccaaggtggaggcagcctgaggagacctggggacaccctctgtacctttgcaggtggggccaaaggcatttgcttatgatttggatgtggggcttcagtacaagaaaagaatcaaagatgcccccaagggttttggtctgagacaccggaagaatgcaccccttgctgagatggggaaactgcggaggaccagggttctcttttgcggtaagggagggtgtgaagaatttggtctgaaatgcctaccatagatccaagaggagatgattagtagagagctggatttatgagtctggggctccggggagtgtgcaaggccagacatagagattcaagagtcgtcggcaggaccggctccaagagtgtatgccctgcagctgctcagagtctggctcttacaagagtcagcacttgcttggatgttctgcccagtgttgctgtcttgaaagtcttaatttttgaacaaggggcccaccttttcattttacacgggcccctaagaattatgtgatcagctgtcaatgtgtacagatgtgacttagaaaagaggggtccttggatagagtcctgggcactctaacattttgaggttagggagatgagggtcaacagaaggggcctgagaggatggccagggaggtccccggaaacccggagggagtgctctgaaactcagtgtggagatgttcaggaaggggtggggtgtacctgtgcccagtgctgctgagctcaataaagatgaggctggagaactgtcatgtaagtggaggtcactggtgatcttgaaaagagctgttaacatatcattgtggggaagaacgcctaatagagcaggtgtaagagtaacaggacaggaactggaaacagcaagtccggaaaactcttttgagtgaatattgcagaaaaggcagggggagaagcagatcgagtggtagctggaggaaaatgtgagttcaagagaggtcgctttgttttgagactgttctacagtctgacggcatgaacatcaacgcaggaagcttttagggagcaggggggaaggcagtgatctgagagtaaccgtgagaagcagggtcctcctggcagagcagttaaggcaagaagtttcaggaatagtcagaggggtcgggttgtgagggatcttgctgatgataggctgaaagttccaggagacagagtggaggctctgagatggggcctgtttagggtatttgcataatgtatggagaagaaagaggatctgcatagtgtgggctcctggggacactgatggaaacaggggcagagggcctgacaatcgtgtactcccataaaaatactaaacaaagatgtgtgatttttagtgaagtctgctacttctcattattaaaaaataaactaatgatgaaaggattgcagatcacagtcagcttcaagagtatatgctgagctgtatactatttttaaaaataattctggaatattttcttgtctgagccatctttgactcttatcttgttctgcatattcaattgcactttgatcagttttagctttccccaaatatctacttggtgccagtgtgtctcattttaccaaatgatgaaaatccaaagatttgtgaccatggggatcctcttgcccgtatagtgcttacagtctgctcagggtggagccccttagaatggaaacaaagtcagtgacaaatatatatcagtgccttctatgtgcccggcatggttctaggtgctagagacagagcagggaacacagcagtgtgtctcacagagcttatggtctaggcagtgactacagtgcacgtgggaagagctctcaactctcttctctcaccttgacccagatgagtaaggaaattaagggtgtacatgtgaatatgggtgttgggggttgtgggaggggaggagtggggacagaaaggaaggaagttgttttctatggacgacagcatcagtgctgtctatggcagaagctcttccctatcttaccgcatttctggacttagtgaaagaacgggcaggcaggaagtgcacagaccaagtgcagaacccagaggactacaaatattctttttttttttttattttgagcctgtcgtcaggctggagtgcagtggtgtgatctcggctcactgcaacctccgcctcccgggttcaagcaattctgctgcctcagcctcccaagtagctgggattataggctcccaccaccacactcagctaatttttgtatttttagtagatacggggtttcaccatgttggccaggattgtctcgatctcttaacctcgtgatccacccacctcgacctccctaagtgctgggattacaggcgtgagccaccgtttggaccaggactacaaaccttctagaaactgcccctggagccctcctctaaattccacacccaactcaccctgccctctgctggtcatcaaaggtattttttaatgtgtgttttctgtttttgccagaacaacctgccccaagtttcaaggaggagaatcagggcagctgaaaatacaagccgtgctaatgtgagaatgtaatagctggaggatatctcagagatggtctgatcccttcactttacaaatgaaaaaaaaattcggagaaattccttacttgctgcttaatttctgtcaggacaagctaattagcaagtccagtgtggttcttatcattgcccacctgcctagttcaatatcagatctaaatgcaacagaatacgctcattgattctatatggttttctcttccttgataagaaataaagataataatctaatttctcctgcttccatttcctatactaccctttgtgtgctcagtaattacagattttactgaactctgtcatgggcagtttttggacttggtctaatggtctagattctgtttggaagtttcttaagggcagtatatctaggggttaaaaccccagaatttagggttaaagagaattgaattcaggttttaacactgtcatttctacctatatggcattcaaaagattcatttacctctgttacagataaagataaaaataagaatttgcacttcatgggtggttggtagtggtctgtgggtatgtgcatataagtgcatgcactaactgacacattatcaagatgatatcgacaacatgttagatttctcccatgctgcccatcgtcatctaaggcaaagtcctccagctaggtatttatcctatgtaatagaagaattggcaaaacttttgttattattttcctttctaaatctaatgatggaggcctaactaggagaggacctcatagtcatcacaggagaatttaaatgttcttttactgtcattatccaggtgtaaatgattgcagaaataagcgcttactcaccaggagctctgattctggacagagtgttcatcctgtagtggctctgaaggtcatcaccttctgttgaaagaagtcctgactacaaggccgtcttctaccccacaggtggccaataagcacctctgcggacgccttccgttgtccagtaattgattttacatttacaacggatgtgttatcttaaaccctcctcagaggtgccagctagacaaatggaatattttacagttattttcgaaaaagtttttaagcatttatgagacgaagtgtatacagtgcctctaaagaagggtctctattcttcctccttggatctttacatttactaaatataacttctggtcaataccacactggatacaagatgttatttacatccacttaggctgggaaaagtgctcagcacaaatgttaacaaccattaagaagggctaaaaataaaagtgatctcacttccatgccttgggagtttctccccatcattatcaagggcaaacacagaaacaggacctactccaggacaggagagagcccttccaggaatagagtaaggagtggggacctgtcacaccccagtggctgcctgggtctgcctgcatagatctgtcgtaaaagtacctggatggctgggcacagtggctcatgtctgcaatcccagtactttgggaggccgagacgggtggatcatatgaggtcaggagttcaagaccagcctggccaacatagtgaaaccctaaaagtacaaaaattagccaagtggtaatggtgcgtgcctgtaatccctgtaactcggcaggctgaggcaggagaatgacttgagtctgtgaggtggaggttgtggtgagccaagattgcaccattgcactccagtctgggcaacagggtgagactctctctctaacaaaacaaaacaaagcaaaacaaaacaaaacagtacttgaatggccaagcctgttggctcacgtgtgtaatctcagcactttgggaggcccaggtgggaggttcacttgaggccaggagttcgagaccagcctgtacaacatagtgagaccccatctctacaaaaaaattataaatagccaggcattgtggcacatgcctgtagtcccagctacttgagaggctgaggcagaaggattgcttgagcccaggaatttgaggctgcaatgagctactgcaccagtgcattccagcctggacaacagagcgagacccttcctctaaagaaaaaaaaaaagagcacatgaatgatgctggtcactccccagctgtggtgggggagggttactgggcccaatattaccatagatacatgtgtgcttgtttatgtgaataggtctcttgctctgacggttcatttcttccctcccttactgcccctgtaaagcttatcatataatatttcatgctaaaaagtgatctaatcctcattaactctgttttttttccagagttttgcatttttttttttgtaatcattagtttataaatactgcccattttgctttccatcacaatcattcccaggtgagtgtagaaaaagctgcattcaggaatatggtaaaatattgcaggaagatttatgccattttgattggtttgtttcaggttgcctgaatttttaatacccctttcttgtcacagagaagagaactttgttatttttggctttcactggagttctcacttcagagttggttagtatgagtttctgctttccaagctgacatgtttttttctttttagcatctgttccatatacagggtgaatagctacagggttccaaaactgcgagtgaagcacctcctccacatattcctcactagcctgcataactgacagcacttggctgtctccggccctgctgtcctagctactctgcagctctgcccacctgatactgcgccactgatggcaggcagtgctgttgggaagagagcaaaggaagtgagtctggtgctgtgagaacaaagataataaaggtaattactaatatgcctttagtgtttttcgcatatttttcttacggatcctcacaccatccctctgagaaatatattattattgcctcccatttaaaaattctatatgcatatttgtatacttttctttttaaataaaggcaggagagaagaaatactccagataggagaaatattcttttcttttctcctcttttgcagagaatgttaaggcaggctccttaattttgattcagaggttttgcattcagaagtaagtgttcctgtcttgtgtaatcttttgccaaatcatcagcaatgtacatttcacacattgcagggaagcatttgggtgctcctcctcccttttctatctctagagatactgtgtaagccaaatgcagcaccgaggatcccaggattactgtaaatattttaagcacattatggagactgattatataggaaactggggtaagcaaactactccatggagtgagtgagtacttctctatactgacatttggaatctcattccagatatttagttcaaagacagttgcttttttcacggtcatgatatgttaatatcggggagcagttcattcatattcaaaggagagaacagtggcctggctgataatatatttggttactgcaccatgggatcaggcctcttatcagctatttttagtcacataatgattatccttgtttaagtctcttccattttctttttgttgtctttattctaatgcattgaggaaacataacattggttttaaaactgcagaatttttgtttttaaccctcagtagttactgtatatgtagcaaactaagtggtcttctgggactcggcggagcgggccctgctaagcgtgtaagatagtgtgccgtttctgctacgtcccctgccccagcgtgccgtgtccccaggttactctgctgtccatttgtgctggagagaataatagaaataaacagtctttctgggtccactctaagttcattttcctgttgccccttcctgaagcttggaaatacatttattcaactcgattgaactcttctactgtctgattttctggtgttagagtttgggcaaattttctggaagggaagacaccagcgtgggcaggcaactgagaagggttctcgggtaagaataaactgggctggatgcaaacacagcgatgagtgaagattgtaaatgaaatgcacagttaggggctgttgtaatactccaggtgtaaaataatgaggcctgaacccatgcagcatcagagagacgtgcaagtcatgatggaaaacagctgggttgcaatcaagccatacaaatggaaaccagggagatgagagatgagggaggagctctccctggtcttgggcaagtagaattgttgagcttgtagcttgcttgtctaatatttgtcctttagagagcccaagatactttgtacagagtaggcaatactttgtagagtcagattattgaagttgaaggtgactttacagatctttgccgcgcagtagagtggccactagctgcatgtggctgaagaaatggtgagtcatggttgagctgggctgtaacggcaaaatgtgcactggatttctgagacttagtatgaaaaaggaaaataaaacagttcattcataatgttttctgtttattatatatcgaaataatattttggatatgtgagattaaataaaatatattattaaaattattttatgtatctctttgtacttttttagtgcagctgctagaaagtttaaaattgtatatgtggtctgcattatatttctattggtgaacaaattatagatcatctagtccaaatattttaattgattatttatggaattgcagacttgcagaaataaaattatctgacggtcaacacccccattgctacacagggaaaccaaggtcatgaaaggtgaagttccagggacttgtctggtcttccaagggtagtaccagtgtgaaagaactaaagccacgtctttggattccccaagtattaaaaaaaatttgtttttcttccctgccccctccctccagcatttttttcagggttatttatcttcctcttgagtcagtatctccctcgggcacactctaagatatccaccttcagttaattttgaaaatgaactgggtcatggcactaggaaataccattatatttctttgaacctaatctctaatagaatctggttgcttgcgtcttttagtatggtctgatattatcagtcagtatttatggagaggatcttcaacacactcacgatttatgattaatctcacttttgactgcatgataaatcttagtgtcctacacaacaaccttcttgaagaccagtgggcgtctcagcagcaatgtttttcttctcagagaccggtcattgatgggagttgagcaccttttaaagcaatacatttaaaaatgtgttcctgctactgcacattttctccataacatattactttctcaaataagcatgttggaaaaatggaggaagtaaatacaaaagagaagaagtctgaatagataatgttcaaataccattaggttgtgagtggctctgagtcctgctaggaagacaaaggtaggttttattaccaggggatgctgctggacttttaaaattgttcaagactttgagtttttaggcatttcttttaaactacattgatgaaattatggactgtgataataaacacagtgatggcaaccaagatgatactatgtgatgattagttgtctgataacttgtatcagtgtgtggttactttgatttcactcataatttgtgagtccatatgatgagagctgtgttgtctgcagtctgtgatatttttcagtggagatcttggccttctacgcgtgggtatagagtgtggctgaagagccccagggtaggagagctagtccagagttctgagaccacccgccaggctcttctacgcaggatgatatgttgacaagatattacagggcaatgtcggcagtgttgtgcagaggaagtggggatgccgtctgtgtaaacattgtgatgatgtctgtgttaacactatgaattcagcaccatagcgtcacaccatgatgtcacactgtgtcacaccgtgacaatgtataatggcatgtatcccccaatgtggtatcatacagaagagtttcactgccctaaaaatcccctgtgctccagctgttcatcccatccttcctctctaacctccggcaaccactgatctttttactgtctccatagttacagttttgctctttacacaatgtcatgtagttagcatcatatagcatgaagccttttcagattggcttcttttacttagcaatatgcatttaacattcccccatgtcatttcatggcttgatagctcatttctttttatccttgaataatactccattgcctatctgtaccacagtgtatcaattcacctactgaagaacatcttgggtgctttcacttttttgaaattataaataaagctgctataaatacttctgtgcaggtttttgtgtggacataagttttcacgtcttttgggaaaattccaaggagtgtgattgctggtttgtatgctaagagtatgtttagttttggaagaaattgccagattgtcttccaaagtggctgtaccattttgcatccccaccagcaatgaatgagagttcctattgctccatatcctcaccagcatttggtgctttcagtgttttgaattttagccatttgatagatgtgtagtggtgtctcgttatttaaatttgtgattttctcatgacatatgacgttgagaatctttccatatgtaattgccatctgtatatcttctttggtgaaacatctgtttagatcttttgtccttttttttttttttgagacagagtctcgctgtgtcgcccaggctggagtgcagtggcacgatctcagctcactgcaagctccgcctcccgggttcacgccattctcctgcctcagcctcccgagtagctgggactacaggtgcccgccaccatgcccagctaattttttgtatttttagtggagacggggtttcatcatgttagccaggatggtctccatctcctgacttcgtgatctgcccaccttggcctcccaaagtgctgggattacaggtgtgagccaccacacccagccttttctttttgagacagagtcttgctttgttgccaggctggagctcagtggcacgatctcagctcactacaacctcctcctcccgggttcaagagattctcctgcctcagcctcccaagtagctgggactacaggcgtgcaccaccatgcccagctaatatttgtatttttagtagagacggggtttcaccatgttggccaggatggtctcaatctccatttgtatttttagtagagacggcgtttcaccatgttggccaggatggtctcaatctcctgaccttgtgatccacccacctcagcctcccaaagtgctgggattacaggcgtgtgccttttgtccatcttttaattgggttgtttgttttcctagttttgagtttgaagagttctttgtatattttggatgccagtcctttataaaaaaatcagaaacatgttttccaaatatcctctcccagtccatggcttgtctttcattctcttaacagtgtcttttgcagggtgaagttttaactttagcgaaatccaacttatcaatatgttctttcatgaattatacttctggcgtttcaaggtattttgatagtatttttgcttacctttttgaaattatacatttaaatttattcttttagagggtatacttatattatgaatatagtatttacttactttgtccctaacaatggctagagtttattagtatatatatccttttcttctccatagtgaccctctccaaacaaaaagaaggcaaaaaccttggcacagttttactccctacccctgactctcccctactttctcccttgtcacagtcatctgagttggttccagagagtaattatttttctctggataacaggtatgtgtgactttctttactcagctgtgcttccttgggttttattcccgttgctagagtagatccctggggatcttttagggagcatctgtgagtggccatctgtcttatttttttcatgtccctaaaaacgctttcatgtcatcttcacaagtaagtgacagttttgctgtctaaggaattctagattcaaaattctttttctctggcaccctgctttattatcttactcctacccagatttgctgatgagcatagacatcagtctggttcttgttcctttgcagcttagctatttttttagttttgattagtttttaatgatatatctatctttgatgttctgaaatttcaatacgatggtttaagtattccttttattccatttgttgtctggtcaacactggaaagatcttgcaatctgacactgggtctttcttttttggggagaagtcctcttgtctcatgtcttcaagtgtggccttccatgcattctcccttttctggtggcaactctagaattagactgctcttgccacttctgtctttgctcccagctttcttaattttccttaaatctctttgtgccccatttttgaagaattcttgtctttgtcttcgtgtttggtaattcgctcttcagctttgttttgcgttgttttgtttttatcctttccagttcatagtatctatcaagtttttatttcaacaattattttttttcttggaaagatctctaactgactcttttttcataacagcctagtattgcttcatgtattgaatatgcacccatttcctggaggttctgaattacacttatttaaaaatctttttctgattgttttgttatttaagttctgtttgcctcctctttttcttggtgttcatgaatcttaaatgtcttatgattccagaacccccatcccagttttttggcagtcgggagtcccaggaggaggcagtgaaaagctgcagggctgtgtgacactgccttgagcaagtgcagggatgggtgggacatgccccgggttgggctgcaccagtggctgctttgctgagctatattgctcaatgtttcttccacataagcagctccatgttccataaacagtggggaagccgtctccaaagggctttagttagtcttttgattttcagagggccagtgttttagtggtttaacccttaacccagtgtctttagggaccacattagccatgcaaggagtttatattgctctttcctttcttttgctgaaatgcctgcatgctggtggaggagggaagccaactgagctgtgctatttcatgtgacttgtgctgcagtttatgctgaattcagccctttgtttaggcaaggttatagtccagatgagtccagtcagacctgcttttacattttgatcctggcacttactagctgggtatctttggggaagttacctaattcgctcagcctcactttcctcctctataaaatgtcagtagtaatacctccttcactgaattactgagacttaaacaagataacatatataaagcacttcacactatctgaaacttaataagtattacctattcatataaaattaataattaaaaaagacattgttattatttttagaataatataccaggggcatagagagctgaacctcttccattttattttgtctataactggattggtaacttctcttcatataattcgaatttcatgtggatacaatgcctttggacagtttaatgatccccctggtgggcttaagtttttttgtttttatttgagatgaagtcttgctctgtttccaggctggagtgcagtggtgcaatcagggctcactgcagccttgacatcccaggctcaagcaatcctctcaccttagcctcctgagtagctgggactacaggtacacaccactatgcccagctaatttttaaaatttttggtagagatgaggtctccctgtgttgcccagacttgggcttaaattttttttttttttttgtagacaatttgctctgttgcccaggctggagtgcagtggttcgaccttagcggtacactgcaacctctgcctcctgggttctagcgattctcctgcctcaggctcccaagtagctgggattacaggcataagccaccacacctggctaatttttgtatttttagtagagatggggtttcaccatgttggccaggctggtctcgaactcctggccttaagtaatccacccacctcagcctcccaaagtgctgggattacaggtgtgagccacctctcctggccgggcttaattttcaaagagcattataaaagtctgctcacatcggtgagtgcatgggagaattcagttgttcccgagaaacaaaaccagttttctttgtgatgatggtgcttcgttaaacttagaggaactcagtcattatgtagagtccgattaaccaacctctccacccctaccctggtcactgatgggaatatcgaggcaggctgaggtggcacccattcaaacttgtacttcagcaaactatgctaagccatgtggtagtctgaagattaatagtgatgaatggttcttcccttggaatccaaatagccatttcctcttctctctaagaatgaaagctatgacccccacattaattccagattctgaaacaatttattggtggcgtttttttctctgccttgatttccctacagaacacatcttctggggacctcttgtcagtggatcctgtcaatacaggattcttggtgttcaactacttattaaaaaaacacaggccgggcacggaggctcacgcctgtaatcccagcacctctgggaggctgaggcgggcggatcacaaggtcaggagatcgagaccaatctggctaacacggtgaaaccccgtctctactaaaaatacaaaaaagtagccgggcgtggtggcgggcacctgtagtcccagctacttgggaggctgaagcaggagaatggcgggaacccgggaggcggagcttgcagtgagccgagatcgcgcccttgcactccagcctgggcgtcagagcgagactccatctcaaaaaaaacagaacaaaacaaaacaaaaaacaggattcagtcacttctctctggacttttctgaagataattttcccacttccttagccttgttaatatagagaactggctcattccgtgcttgggactaagacagtgaataaccggagaaacattgccgaggtgattctgcctagaaagcaatcaaggatttccagggcagcggtgagcagccatgagcctcaagctggatgctttagcaggagtttaaatagcacaaatgggtctgtgctgcagggtctaaatggacctgtcttttccagacctgaaacttttctttctgcgtgtttgtacacattcatctctacgcactcgcttctgcttttgtgggtcactttgaggtggtctcagtcctagtcacgtcctaggttattgtagcacattctaactatttcgggtgttgggctgagctcttggtggggttcacctgctagagcctgggtttaatggtggtccacttctgtcgttgggatgtgcacagcttcactgccttagtgacctcacccgtcgctaaaatgggcataaacgacaaacccatttatcaacttacttcgaggcgcacgtagagaaataggagaacaattggagtgactggaacattatttagagctgtaattttctaaaacttgaataattttagaattttcagagtttttgataggtctttaaacttaaaagtttaaagataggggtttcgttctttaatctgcaaatgtttctatatactgattaaaatctctttactaggcctggcgtggtggctcatgcctgtaatcccagcactttgggagggcagggtaggtggatcacctgaggtcaggagtttgagaccagcctggacaacatggtgaaaccctgtctctactaaaaatataaaattagccaggtgtggtggcacatgcctggaatcccagctactcaggaggctgaggcaggagattcacttgagcctgggaggcagaggctgtggtgagccaagattgcaccactgcactccagcctgggcaacagagtgagactccatctcaaaaaaaaaaaaaatctctttactagtgttttcagttatttttatggtgagggctgttttggttgagatattgttgtgttaccttatttagtgtcagaattaagaaaggaagggagggaaggagagaaagaaggaggaaggaaagaaggaaggaagggataaaggaagtgaaaagaagaaagctggctcctgggggagaagtcaaggacacttcagcacagttcccagttcctgtggtcaggagagcttgtctcagtgtagcaggacaagccgcagacaaaacccctcagacactgagttaaagaaggaagggctttattcagccgggagctttggcaagactcacgtctctaacaaccgagctccccaagtgagcaattcctgtcccttttaagggctcaggactctaagggggtccgtgtgagaggaccgtgatcgattgagcaagcagggagtacgtgactgggggctgcgcgcactggtaattagaatggagcagaacaggacagggattttcgcagtgcttttctatacaatgtctgtaatctatagataacataaccgatcaggtcaggggtggatctttaactaccaggcccaggtgtggcaccgggctgtctgcttgtggatttcatttctgccttttagtttttacttctttctttggaggcagaaattgggcataagacaatgtgaggggtggtctcctcccttatcaggagggagctaaacacgggagcagtgacacggccagcaatgggcaggaggggaagttggggtgagggcaggtgtgcatgaaacacaggctgaaggaaatgatgtctccacatgtttgatggaaaacagattcaccagggaagagaaagccaatgggaatccaatgaaagggtcttgggccaagctctgtggtgtggaagaaatgcagctctgcagcagggggattcagtgagcacaggacctgcacccaataggagactcatcacaattaaattacctgttataaggctgtgataagacaaacaagaacttggtcaagatggtggcactcagtgaaatttgggggaagccaaggctggaagtagccactgttttacttccaggaattgaaaataggcaagtttggaaacaggaaactctagcattttagatgtaaggagaatcaaatagaaattgttgggtttttgtaatattaaagtagaacatgactttgttgagtataataattatttctgtcatattttcccccctaaaatactgaaactctgggcttaatgaggccagtaattgtcagccaaggaaataagacaacaggctgaaaaaaggcagcatcagcactggcacagtccaagcactttctgggaggtatgctaaactggtctagggttacttggaaatcttcagccccttctgttagtcagggacaaatgaactagagcaccgagggtgaaatatacgagtggttgacttagacaccctgagaggtgttgagaaaagttgtgtttggtaattaatggagaaatgcatttgtgaacctgtttatcaaattcaactttggattgaagaagtacaccgagtagcttcacttagctgctttttactcaaatcaacaaatatttgttgaacatcttttgtgtctaatgtgtcagtcagtgacctggattcatagttgtggatgaaggatgcataatactccatagttcccatttccaaggtgtttaccatctggctggggagagaagacctggacatgtaaaaaggaaacagtgaaaagtaagcgatgtccaaggcaatactagaagagatgctcacaaggcataattaattgctaaaggagttgtgaggataaatgaacacttgaagcaaagagtggtcatggtcaacttttaagaagaggacacaagttaggtttcaattttttgccttttgttttgttttgttttgttttgttttgaaacggagtcttgctctgtcacccaggctggagtgcagtggtgcgatctcagctgactgcaacttccacttcccaggttcaaacgattctcctacctcagcctctgagtagctgggaatacaggcatgtgccttaacacccagctaatttttgtatttttagtacagatgaggtttcaccatcttggccaggctggtcttgaactcctgacctcaagtgatccacccacctcggcctcccaaagtgctgggattacaggcatgagccaccttgcccagcccatttttttggctttttaaaagtcaaggttattaagatataatttacacacagtgaaatgtgcccttttgaggtgtatagtatgcatagtgtatgggtgtataatgtggcttgatgactttcacaaatacatagctgtgtacagtcaagatagggattttccatcacccctaaagttctcccctgtccctttgtactcagtttccttcccctctcccagcccctatttaccactgatctgatttctgactctgtagttttgtctttcccagaatgtcatacaaatggaatcaaacagtgtgcagtcttctttgtctggcttctttcacttacatactgcttttaagattcatccggccaggtgcagtggctcacgcctgtaatctcagcattttgggaggccaagctgggtggatcatttgaggtcaggagttcgagaccagccaggccatcatggtgaaaccctttctctactaaaaatacaaaacttagctgggtgtggtggtacacacctgtaatcccagctactcagggagacaggagaattgcttgaacccgggaggcagaggttgcagtgagccgagatcatgccactgcactccagcctgggcaacagagcaagactccgtctcaaaaaaaaaaaaaaaattcatctatgttgccacatatctcagtggtttcattccttaggattactgagttgtgttctattattatagggatggactgcagtttgttcattagttcccctgcttctttgagctaagtttcaaaggacagtagatttaaatggtcaggagagaggggaaatgggataattggaggtaaaatggcataaggcagaacagaatgagccactgaggtgtatcctgcttctgggaagaatcagtaaatcagagaagatgactcctggatatgaggcttcatctgcatttttattataaatgaatccagctcaagccttatctcctccttcatacttcaacctgcagtaatttctccctactctgaatttctattcatgtgtccattcttcacccatctattcatctgtccatccatccatcattgatccacccattctttcatcatctattttatttgtccttcatttaacgacctttgtttcaggtcaccaacgtgccaggcactgactcacgaacaggttaaacaagttaaaaatcataatccctttccccaagaagttcttaggaatctgctgggggaaacagcaagaaaggtgaagctaataacagtaactgtatactgctttacatcattgttttactctccatgtgtgtccttgggggcaggaagctcaccttgccatctacttcagtgccttgaatatcataagaggtcaacaagtacaaaaaatagctaaagctgcagcattgtagcttagttttggcctttggaaaagaaagaaacttacatgtatggatgctgacgtttttgcccttccaggaggccatacagaggccgtacagaaggaaggccacagtggggactcttgaacaggctgtcttgagtggatggagggttcagggaaaatctcagcatgcaacagttacgttttcctcatcaagaatatgcggttgaaaaaaatgatttggaaaatgccaacaggcatctatcacactttgatataaatgcatgcatataaaagtcaaactatcagattcctttgcacaggtggatgggcaaaggcagccaatttgtcgctgggtctgcttgtttagtgctgagctggtgcaatgtgatagtgcagtgagctcagcccaccctggtcaacagaagctctccggggctgacctcacacgcagcaatagataatgagcaccacccctcaagtgcctgatacactagtcagaagaactttctgtttctttggtgcatactgcacctttcctttgcacatcagcacatgtctgtgaaaataatttaaaatctaagctgttgaaactttaaattattttgagccttaagggaatgtgattttgggacccgagtcatgtgacaggcagttgtaacctaggagctgtaaccttagtttctctgatcatagattggccttcttccttacctatattgttttgtaaaatgttgtaaatgactaaacagtcccatggaagacctcttccctctccactgttgatcttcagtgtaaaattaacttccctctttgctccctcacacagacttcatgagtatcacacagtctaaggtggaatgttaaatatattcttttaaattagaaaagaaatcagaaggctttcagaaaagaaaacaaactgtaactaattaaattattgtaactcataaactagccttttataaaaaaattttgtaatcctgttaaatttctttgttttcttcttacaaaaacaagaccttaactttgaacttcagagcagtgaccccatttctctggagcatgtgtttctaggatgccaatttacaactttttgcttgaataaacttttaaaaactggattctaagccgggcgtggtggctcatacctgtagttccagtgacttgggaggctgaggcaggaggattgcttcaggccaggagtttgagaccagactgggcaaaacaatgaagcctcatctctacaaaaaaaaaacaaaaaagaaaaatgaactggattctgatccttttgattatttcaggttgacatgtccctccaaacccaaatgtccccttttccctgggacccttcatggttgataaagattgataagcttttctttccctgagccatattgacactttatctgtaccactttttagttcatggatacttttttttagccttctcaaatttatttacatacttttttttttttttaagacagaggcttgctctgtcacccaggctggagtacagtggcatgatcataactcactgcagcctcaacttcctaagctcaaaaaatcctcttgcttcagtctcctgagtatctggggctacaggcgcgtgccaccatgcttggctaattatcttttattttttgtagtgatgggatctcactatgttgcccaggctaatttcaaactcctggctaagtactgggattaccagtgtgagccacctcacccaacctatttacatactttttttattgttgttttttgagacagggtctcactctgtcacccaggctggagtgcagtggtgcaatctcagctcactgcaacctctgcctcctgggttcaagtgactctcctgcctcagcctccagagtagctgggattacaggtatgtaccaccatgcccagctaacttttgtatttttagtagagatggggtttcaccatgttggccaggctggtcttgaactcctgacctcaggtgatctgcctgcctcggcctcctaaagtgctgggattacaggcatgagccactgtgcccagcccctatttatatactttttgactcctctatataacttacagcatcttaggaatctgaggttcattttatgttgtgcatgccttgactataatacatgctcagtacacatttattgacaatctgacataagacagtggggttagctgggaagggtccagagttctgcatcaggtagactgaggttgaatcttgaacattgatcatgggatcttgggaaaactatgaaacttatccaagactcagtgtagtaacctataaaacaggaatattatcttaggatcaatgagaggaactgcaaactgcctagcttttgatagttattctataagtactgttttattgtcctggttgttttaaaaaaatgaagtgaatgatcactgtaactgtcatcaccttgtaagtgcatctttaaagcaggttgtaaagattctgatggatggtttcagtattttaggtggagtttacagcctgtagatgagcttggcttgttctctatagtgtgattagacatgtctgcctgttctggccattggtaggctgagagtctagtggaaggagagctcattactggctagcagtgatgcagggaagttggattcaggcaggcatcaacaaagatgttgctcaggataattcattaagacataaacttgctttgtgtaatttttggtatctgtgttttacttaacaatagaaaacaaaataaaagaagcaaactgaaaaccaagacaaaataaaactccaagtctaactaggatgtggcaggctgaatccaggctgtgcccccgagcctgaggggcaaccaaccagaagaggaagataaagacaaagcaggaggcggcagagaccaattgctggccggattgatgacataggtcagatctaggcttgccaggcctgtgaaggggaccataatatgtcaccctgaaatatgccttttggactaagggttattttgagctgaaggcaattaagaaacatcagatgcagaaaggaaaaaaaaaggcttactgtccttcccctatctggctaaaaacagaacataaatttccatttgtaaaagtgtctccctctcccataccagaaaaagcacaataactcttcgtcacctgagatgactagagtcttatcagcccagagcagtgagtggagcctgcatgacaagccttactaaagcagccttatcttccattaatttccccacatatttaccctcccacaatttattgcccttagaagccttcccttttcctttgtcttgtcacagcttcacaatttatcattctttgttgaagtagtatgtaagctctctagcctatgtacttctttgggtctctctctatatacatacaaagactctatgtcttcctaaaactatgatgtcaaataaaatttgcatgtcttttcttctcttcatttgtcttttttcagtttgattagcagggccctcgctcctgaacctaggatggtagaggggcagggttttccacccactattggcattcttctggtcatccctcagtaggctgctggtccatctgcaatgtgtccacttagttaccaaagccagagatcttgtcttgggcctgagggggcttctgtcttttttaaaaatgccttgagactctgcttgtcatcctcaccttcagttctgtggcttgtaggggtcaagggaaagctttcccttcgccctctgaaagtttgctgaaaaaatctactcaaaaaaggcagattacttggagaaaaggcatacacatttattaacgtatacatgggagccttcagaataaagaccaaaagataaaggaaaattgtccatttttatgcttaggtttaacaaagtatggagagccaggaagagagatgattggacagaaaaggtgcaatcatagctcactgcagccttgaactcctgggctcaaacgatcctcccagctcagtctattgagtatctagaactacaggcatgtgccaccatgcttggctaatttttgaatttttttgtagagatggggtcttgctatgttgctcaggggtgtctcaaacccctggcctcaagtgatcgccctgcctcagtcttcaaaagtgctagaattacaggcacgagccactgtgtctggctgatccaatttttctttctttttttttttgacggagtctcactctgtccccaggctggagtgcagtggcgcaatctcagctcactgctacctccgtctcctgggttcaagagctttccctacctcagcttcctgagtagctgggactacaggtgtgcatcaccatgcccagctaatttttttatttttagtaaagagggggtttcaccatgttggccaggatggtcttgatctcctgacctcgtggtctgcccgccttggcctcccaaagtgctgagattacaggtgtgagccaccacgcccagccctgatccaatgttaatagactgagtggggaaacccagcaaggcctgcctgtctggattcttctcgttctcttggagcagcctatcttccttcttggtgtggagtgggatcctctctgcaatgaggaacttagggcctacagtcaaacaaggtaggtcagataactttcttatggccagtttttacacagaaagaggaaaagttagagtgctttttttaggttttatggctggccttggggaaaaggggttctagtttctatgacctaccttgaggaagagggattctagtttttatggctagcctgggggatgatgggactgagagacaatagggcaaaagaaggtcagagagaaacttctgcttctgaggccttgattttagggtattgttttctcagtcccagccggcttctgtcctggctcttacctctaggaacatggcctaatttgcccttgaccccgggtagcctgcaatcatgagggtgctcttgggtgcattactatcttcatgttcccaatctttgctctcacgaactctattttggggctggaaatttcatgtttttaacactgactcttagttgtgggcgagcgcctgccactagcaagtatgcatttcctttcctttctactttcaggcttttcagacacatctattgcggggaggactctaaaaactttgccaatatatgcaatgttatcaatccactggcatgactgtggtgagacagaacactcacacagcaagctttcagcaaagcagctttattactcacagataggcagcaagagatggtagaagcctgggcccatggcggaccagtccctcagggttcaggaaagctgcccaaggcggatggagtcttgtctttgacaccaaaggcgtgccccttggtgggggtgggggtggctgttttcgctgagttaaataaagccttgctggacatcctgttctaggaagacgggaacagagcctaggctgttctggtcagtgcctccttatctcaggttgtcgcattcccagcacattctccagttgtccttaggaactaccagtgaggaggggaagagctgggtctccaaggccatgcagacagttgtcctatagcaccttagaaaaaggcttgtctccttcttataggacctggtgaaagtccacatgaattatcaaaaccatcaatatactgatatttttctgtcaagtcataaaacaccagcctctatgaacaagtggttgaaatcctgtgacgctcaggtccctttcagcctgcctactctgctgctgctggcccatgaccacaacttcctaataaggcgtggaggggtcctctctgctcctcacccaccttgactcagtgcacagtcacactccaggacgggctgcttgcaatatgggtccatttctggggacccatttttctcttcactgggaaaccctgagaattttcctttactattggtcattatgctttgttgaggaaaaaagccagactctgtaaaatatttgaaaaggtttattctgagccaaatgtgaggatcatgacctgtgacagcctcatcaggtcctgagaacatgtgcccaaggtggctgggttacagcttgattttatgcattttggggagctagaagttataggcaatggcataaaccaatacatataaggtgtacattggtttggccaagaaaactgtgacatctcaaagtgggggcttccaagtcataggtggattcaaagatttcctgattgacaattggttgaaagagttcagcttcacctgaattgttgaaggcagcgggaagaaatgcatgggttaagataagggggattgtggaagccaaggtcctgttatgtagatgaagcctccaggtagcagccttagggagaatagatggtaaatgtctcttatcagaacttaaaaggtgtcagactcttagttaatctcttggatcaggaaaagacctggaaatggaaggagattccttacagaatgtaaattttccccacatgagatggctttgcagggccattccaaaatatgtcaaaaaaatatattttggggtaaatactttgattacctttagagcctgttatctgtcatgtgatgctacaccagagcagactggagttggggtcttattgctaaaaagagtctattttgtcagtctttggatctctactttaatgttaatgatggtcatttgcgcctaaacatcaaaagagagaatgtataatgaggtatgtctgaccccctccttcctatcatggcctgagctagtttttcagtacttcttggaatccccttggctgggaggggatccattcagtcggttggggagcttataattttattttggggttacagctttcatatgtacaattacccagttgtgatcactgtgggccatctggtgcatggggacagcccttgctccccctggctcactgctgtgtccctagtgctagacatacagtagatgttaataaacattgttgactacatgccctgtactaaaacttctggaaacacaaatttgaatgagacttagtccctgtccttgaggaactcaggaggggaggaaggtgtctgcagaattatttccaatacaacatgataagctctgttaagagctatcagtgaggttgagaagtggcaggaaagagaagagcatccttctcaccaggtatgagggtgaccaagaaagacttcatgagagaaaagggtgctgtctgccgtaaaatgttcatccataactgaagtaatgcatatgaaaaaaaaataatacaggtggcagacataaatttcaggctctgtacatatgtataataagatatttttactactattacccttttcctctacttgaaaatttgtggcagtttacaacagtgatcacgaaatgccaatctgtggactggcagaagcacgatcccagaaggcaggacctgggtatctaatctgcatgtgtaaataaccagctctaaggaggatgtgatataccacccagtgtggggactgctgggtatggcagtggttcttacactgaagcatgcactggagtcacttggaggcttattaacatgcaggtggctgtttcccaccctcagaagttctgattcaggaagtctgggatgggaccaagaattcgcatttctcacaaattctcaggggatgctgctgctactgttgctggtctgtggcacactctgagaatcactggtgtatagtaagatcctgatttcttagtggttcttctttttttttttttttttttgagacggagtttcgctctgtcgcccaggctggagtgcagtggcgggatctcggctcactgcaagctccgcctcctgggttcacgccattctcctgcctcagcctcccaagtagctgggactacaggagcccgccaccacgcccggctaattttttttttgtatttttagtagagacggggtttcaccgttttagccgggatggtctcgatctcctgacctcgtgatccgcccgcctcggcctcccaaagtgctgggattacaggcgtgagccaccgcgcccggcccgtggttcttctttttcttctccttcctcttcctccttctcctcttcctccttctcctcttcctcctcctcctcttctgcttcctcctcttcttctttcttcttctccttcctactcttcctcttcttctctttcttccctttcttccccctcctctttcatcttcttcttcttcctcttcctcctcctcctcctcttattcttctcctcctttttcttcttccttttctccttctctttctcctttttccttttcttctttcttcttccttttttgaggaagccatcagagctcactgcagccttgaactcttgagcttaagccatcctcccacctcagcctcccaagtagctgggtctacaggcacacactgccacgcccagctaatttttaatttttctgtagagatagggtcttcctatgttgcccaggatagtgtgtgaactcctgggctcaagagatcctcccacatcagcctcctaaagtggctgggatgagaggtgtgagccaccacacctggtttcttggtgcttctgaggaacacagcattccacataaatgacttatctggataactaaagtttatctctccaaatgccaaatctttgtttctttaggtcatattaaaagaacatttactgaaataaattttccacttctttgctttctttttttcttttattgatacataatattttatatatttatggggtacatgcgagtgtttgttacctgcatagaatgtgtgatgatcaagtcagggcatttgggttcttcaacaccttgaatgtttgtcatttctatgtgttagtatcatttcaagtcctctctagttattttgaaatatacacaatattgttgctaacacttctttgctttcttaaccagaggattctgaacaccactgaatcctttcccgatgactccggattattctaatgcacatccattatggttctgcacagtaatacatagggtgggtatttaaaccatttaacaccagacagcatgaggtcacaccagtgaacacagactcttgctgtaacggtgcagaaaggttcttgggcctcctatgctgtggcagttactggcttacgggaaggccttgagggttgtgggaaagggtctgagaaggccggcattgtgggaccacagaaggccttgggacagtggctatttatcactatgtggaagcattttgatatttcaacaacaggaaggatgtattatgcatgtcagccctgaatacacattggttctgtgactgcccacttaacaggaagtttttgtctagtgtttctttattaccaagtcttggggaatcatttatagctaacttcttctcttcattcgtagaataactgccaggcactctgggtttagaggaaaatgaaccagatgtgcagtgagtgtgcggcacagctcggaaatgagacacggtccttaactcctccgagacgcagcactctcagtaaaatttgaatacattcttttccttccagtattgcagaatagtgaggataaaagtgaaagaggatgcaaaagccctttaaaatgtgccatttaaaatgagtattgggcaaatgaaaaggattgttatgatttttactgaaagtgttaaaaagaagtggcatttcttaaatattttcaacctgaaatagtatactgtaacaaatgctgatatcaatcgagttataaattgaatctgaagaaagagctagcagcaagattactaataaatgtttgttctcgggctgtggtaagaaggctcttgtttcctttaagtggcagccaaaagctttttttctctgaaaataaccatttttcattattattctcctgcttcaagctgttcttttttttagcaatgaatacaatcaggttaggttgtgagtgacagaaataagtgcttgttggttcaggagggaaaaagcagtagatgtgtccagtattcatggggtgcacattccaagacacccagtaggtaccggaaacctcggatggtaccgaaatctataaacactatgcttcttcctgcacatacatacctatgataaagtttaatttataaattaggcacagtaagagattaataacaacaataataaaatagaacaatgataataatataccaacatcactactgttgtgctttggggctattattatttagagaaaaggtttcactctgtcgcccaggctggagtgcagtggcatgatcatagctctctatagccttgaactcctgggcccaaacgatcctccctcctcagcctcccaaaatacagaatatggacatgagccactgcacccagcctggggccattagtaagtcaaataagggctacttgaatcctagcactgtgataccacgacagtcaatccaccaagaagactcctaagtgactaaatgggctggctgggagcatccttatcgtgaattcgctggataaggggatgattcacaccctaggtgggaaggagcaggatggtgcgagatttcatcatgccactcagaacagcatgcagtttaaaacttatgagttgtttatttctggaatttttcatttaatattttcaggccatggttgactgcaaggaactgaaactgcagaaagcaaaacggtgggtcaaggcggctcttgtatatgagagcaaggtgtcagacacaaacaggcttcatggacacttggccctgcgtgtgttagggtatgagtatctttctgcatggatgaaagggcaggatgattttaaaggtcctttaaaaatagcatcgtttcttttcttctgtgctggtgtgccctggcactggctcctgggtcagcaccaaatcaaacatatgatttattggttcaatctaattctttctttgcctgttcagcagggtatagctgagtcagactgggctccagtgaaaaagcccctcatggaaatatggttgctatagtttgaacgtttgtgtccccagtgcaacagtattaagaggtggggtatttaggagatgatttggccctgagggctccgcctttgagaatgggattaatgcccttatgaaagggcttgaggcagcaagtttgccctgtcttagtctggttgggctgctataatgaaataccttagactaagtaattcataagtaatagaaatttatttcccacagttctggaggctaggaagtcccagatcaaggcacagccagattcagtttccgatgaggtccctgtgtctgcttcaaagatggtgccttcttgccatgtcatcacatgcaagagatagaaaggaaaataggatggactcattccctgaatcccttttataagggcaccagtcctctccatgagaacagagacctcatgacctaaccatctcctacaggccccaccttttaatactgctgcattggggattacatttcaatacgaactgtggaggggacacaagcattccgaccacagcacctctttttgcctttccaccatgagaggacacggcaaacaaggcaccatcttggaagcagagagcagccctcaccagacactgaatctgcaggtgccttgatcttgatcttccctgcctccattactgtgagacctaggtttctatttataaattacccagcctgtggtattttgttacagcgggaggaagagactaagacaaaggtcccagatgggtttgcctgggaaaatggttgttcccaggccagtccagcttagtttataatattgagttaaatcaggcttggaaagtacagcaatgtactgtgctagagaaaagtacagaaaattctttaaagagagaattcaagttgagttgtggatcctatctccagcttcactgggacctcactgaatgacctcgaatacattttcaattcctctgcatccagacttttcattctaggccagctttctagatcaggagattaggtggttgcctctatctgtgtggcagccatactttttccagaacacaataggaacatatggtcttgaaatattttttctaacatatatttattttgaatggaatgttgcctggcctgccaacttaattccttggtccctcattgcagctatggcacttggagatcagtggtttaaaagagtagatgactcaaagttgggagtgtccatgaaaatccaatgcagatagttgctataatcaataccaaaattatcggtttgctttatttatcccaggtaagataaatcctagaagtatgaaggagggagggggctgcaggaagggatccatgcattcattcactcatccatccatttgaatgtttattgaatacctgttctatgccagacaccgtgttaagtgctgaggatgtactggtgcattaggtataatccttgctctcatggaacttatggctcagtgggagacatgggctgattggtaagtgcttcagcagggaaagtagaggaagcacacaggaaaatcactgagactcagaggccagagcaggcttcctgaggggagtggtcttaagactgaagcctcagttatgcagataaggaagctgggggtggcaagcatgaccaaagccaaggtgaccagaagcctggagatgtgtgagagctggggaggagagctggaagcatccacctggctggcatttgtggagcaaggcagaattgactgaaaagctcagcctggttaaaggatttgaacttcacctgcagggtggtgaagatcctttggaggatgtgaccgtgccacaatgagattcacacttgaggattttggccctggttcaccgtggagagtggcttggagagtggtcatagtgaggaaagcattcaaggagaggaataagtgggggaacacccaggggagtggcagtgagggtggtgggcagtggatgtgcatctgagaaacttgatccatgtggaaaggagggagaaagaggaggcgagcgtgctgctcagatttctggtttgcgcaactgggtgggtgcagaacgcgggaggaagagcagggttgtgtagggataatcatttttcttttttggctgtgctgattgaggtgtctgtgtgggggagggcaggtgtccagcaggcagctggatctgagggtgtggtgctggaaggtgagagactggagagtcatcaatgggcactcgtgggaactgatgttctagtgatggaagagtagccctgggaacaggggaggcgaggaaaaagtgccctgaccagaattcggtgaaacctcaacatctaagggagaagcagagagaggaagagaaagctagaaatgccactgagaagtggccagagcgctgggggaaagcagaagagggtggtctcttggaagcacagggatggccgaatttcaagtcgagtgtgctcagcagggccaaacgctgccgggctggtcagatgaaggctggcaaagggtgtttgggttcagcagcaagaggctgttggagaccttgatgagagcagctccctggaaggctcaggacagaggcctgattacagtgcagaaggagaagaggagggaaggcgcagatgcgaaagtgtagacagcactttccaaaagctcagcttcaaggggagggatgggaagaggctgctgaaaagttgatccgagtccagcaaatggagtcctgaagagaaatgggatctaccgcatatgatgagtcatggatgcccttatgtatccagttaaattagaatgcacagacatttagcattaaagcccatctcccttcattcatttttttctgggagtcccccaggtcttctttctgagtatggcccacgtatctcagcctcccagcaggtgtatcctccctcgcttcggacctctctccttggggtactcccagcgtgctctcttgagaccctaaagagcttatgcaggaccggctccctgggcagccaggtactgcccaaacttgtaacctgcctctccaggagagtttgacaaaccaacaaataaagctcattcagggccacaccttctggatcatgagttttgaaaaaatggacaaaatcctagatatcatgtattagaaacaaagtgttaagatatagcattatatacactattgtgctatgtttttaggctagacagtgccttgcacttcaaagtgcacgtcctaggcaggaacattctgggggaaatggaaaaagcgatttatccataggcacacagccttctctgcttcccctttaactctttttttattctcccactcatgtcttctctcaacctagcttctggcatgttgagtcattcatccattcactcattcatttattcattcatcaaaaatattttgaggactcaccttccaggacatgattggcactaagaactcaaagatgggtaaatcaagagttttgcctgataggggcaatatgacctgttccagtggtcaggtctatgcaaacttacccccaaattctgaggaagcagagacgctgaagaaagaggttgacatatacagtttctcagaaagaaacatttaacagggacttacgaacaggagccatgcctctgtttcaggtggcagagagatggtggcatcccggtgctattatccttcaaatccagggcttacagactataggggactggtggttcagaagggaggtgtaggcaattgaagtatgataacataaggttgctttgacctaagggcaagatttatggtaagtacctgctcttacagcagaaacaataggtaaactggaaatcttagaggccttccctgagcaggagttaatcaaaagccaacatggtaggttagctcccaaggtggaggtggagttgcttttgcttccacatggccaatgctctcataggactatgcatacactacagtgagagcccaacagagggcactcatatatctgcctgggaatgcagaaaggacaaggagggctcacagaggaggtgacatctgagtctagcctggagttggctctctccaggtggctggcatggagaccatgtttggggttggaatctcctgcctcatctccctcctggggatccacctcacttccggaaggccagctcttgagtagggattgctgaaccagttttgttactcttcccagaaaatatgttatctcttccaggtcagatacttatatttcacaaaccgttgtatagctaatgcctcagctcaagcggtggctttcatgtgggccactttcttaggctggcagatggccatgtctctcagatcgtcaggccaccaaggtagcgtcccctctccattggctccagcctgttaccgctgcttccagattctggagacagcaacagcattgctgagaaaggacacttacctggcagtggtgattttaagggccacttaaagataccacggttgggttgaattaagaaccgcagaagagactgcctagatctcagatgttgtgatgatattctcagtgtccacccaaggtttcatgaaagaaaagattctatcattaaatctaatcaaactaggaaaactgctgataagtaccaaggcctgcaagccaaggaggaaagctgtgcagtttgggggaggcaagacagactcattcttaaagcttcatcatttggcttctttcccagcctgtacccagaatcttgaggaagaaaaaggctaattgaatttttgctccctatgaagacccttcctcactagtaaaagttaaaacccagcagacaaggaagcaattttaaaaaaccaaactcttccaactgtatgtattttggaaagtgcaatttgcatcaggtatggtaatactgaaacataatctaaatgagaaactcatatcccaaatattcagtgaagtcagtaaagagtaagaaaagatgctatcttcccactacctataatttccctccatattgaggcctagggaagtggttatgagcttgacaagtagggattatttgattttgaggaggattataaaagagctttatgaggaaaatgatgagcagctattaagagactgcacatgaggaaacaatggaaagacctagaagaaagtggattaaaactgaagaggatatttgaggggttaagaaagacttcctccctgggttttgctggggagatctacatgggtttccaaaggcgattgcagtctgtctttctgtaagtggaataaatcagcaaacatgccttggatggcatcacatcagttctgtgggagataccagggagcataagacatgaactcccacctacgggaggcaaggggagggacagcattaggacaaatacataatgcatgcggggcttaaaacctcgatgacgggttggtcagtgcagcaaaccaccatggcacatgtatacctatgtaacaaacctgcacattctgcacatgtatcctggaacttaaagtaaaaaaatatatatatatttgacattaaaaaaaaatgtggctgggtgcagtggctcatgcctgtaatcccagcactttgggaggccaaggcaggcagatgacgaggtcaggagaccaagacaatcctggccaacgtggtgaaaccccgtctctactaaaatacagaaaattaaccgggcatggtggctcccgcctgtagtcctagctacttgggaggctgaggcagggggtttgcttgaacccaggaggcggaggttgcagtgagccgagattgtgccactgcactccagcctggtgacagagcaagactccgtctcaaaaaaaaaaaagcttgtgcaggatcccaggtgagttagccctgcccttctgggttcccacagacaggatggtgagcagtgaagacttgtacgcagttccctgtggcaggctcatgcacactgatgtgttaatcttgttgaaatatacttttcttctgtcttctgtcagtggatgtttattcggtaactaggttttaatataatgaggtaaaaatttgcaaagtattgtagtaatgtcttattaatgagttctatttataggtgatctacactaagccctaaactctttactttcccaaaataatcttggccttattttaaaagactgtttatagttagagactcctcagatctcttatgctttgggaccactttcttggttccttgctcagctagttcaaggaaactaattttacatccaataattttaatttctgattgtagatgcagaacaatattatgatcctcttggaatgctgcaaaaggagcagcttaaatatggaaataatgagctttctgcaaacatgcaaagaattataataatagttagagaaataaagcattgttgtgatgcttgattttagtaccttcaattatagtttgcaaattcataggtcatttcatggaattgttatttgaatatctttcttatttttctgtactagtatgcccttttctattttgatctttctgtaaagccctctttttttgcaaacaacaatttctgaaaataacactattggcgagaccagcaggcctgctttcatctcttctcagccctggtacatgctgtctactgaagtattgacttaaagtctgcaggctcagtaataatgtctattgtgtctatttacggaaaatgaattttctgggcctcatttcctttcagggagaaagggaataattatggacatttatatatcaccctgagcataattgtgttgaagcaggaaaaatagaaaacaaaaagacaagatcctggacatccagggctcaagatctaagatgtaatattccaaatatcatagcaaatagccaagccaaaatatgaaagacatggcaaaacaggtaacttggaagagtacatgggaaaagtgattcaaaagaatgataatatcttctttcacattcttgtatggattcatcatgagcttcagacagagcaaaaacactgtatcaggcaccatgaagcttagtcaagtgtggtacctccccagagaggataactagggaaaatattgagaatttttaaaaagttgatgtacatcaatgaaacaggagatgcaggcttgcaatcaggaaggatcacctgcctttcaagttttgccagtagaggtaatagaatttttgtattgcagtgacacctaattttgtactgcaatgacaccataattacttttatggcagatagtcgtggttagggtatagtctgactcccatcagccattagagaaatgtagctatcagaaatgagatgaaatgatattaactctccaatgacattgcactcacagttatgtgtgctgccttccagtattggctgctttttaatgtgtgtatgtatatagaaatatgtatgtgtatgtatttgtatacacaaatatacatatttttgtatgtgtattcagaaaatcattctcctaatgggttcagccattaggagaatgattttctgaatacatcacatacaacgtgtgctcagccttctgcacggctcttgctgtagtggtttggtttaccacataaaccccattagcgtctcccatcagccatggcacttacaagtgtaaaagaatttatgtagacagtccgtagtggttttttttcccccttatggtaaagtgttctccctccagtttctgattattgaattcatgtttgtcttcaagaccttcgtcaaatgctatttgttctgggaagcttttcaccttttgttctgtcagaatgaatttaacatttcctcaaagccccagtggcatctattcctacatagaagttaattcacttgcttctgctgtcattacatacctgcttctcccactggattttaagttatttgaactcaatgaccatatcttattcttatttgtaatctcagtgcacaacactgtgcatggtgcatgtcagttcattctaaacaaagtaaaaggattagtaccttgtacagcagatcttattaaatcaacacagtttttcagtactcctgtgagcaaggccctgcgtaagggtcaggtgttctgctaagctttgcagtaagggctggaagaacgtgcacagaaagcttcctcatccataaatgggatggtctgaagatcaagtcacttgtatgttcagtgtctaatgtgagataggtgctcagtctacagtaaccatagctgtcacttgggaatttctctgttggctgttgactgagccaacatcatccctggaatttcactttgagagtttctctgaactgattctactcccttctaggcctgcagcctgcttccaagttttcacaaccactcctttaaccattttcctttgttcttgctatcaaaaccttcgtataaccaatcctgttatgttcatccagtttttctgctgtttttaacatctctgttcccctactgactgtactccaggagttctgggctcttaatctctcaggtaggtccttcccttttcctttctcctggaagcaattcattatgacaatattagcaaaagatgatggtttatttataatgttgtcaaacttataaaatttttacaatcttcttttaaaactagctctatactagggatataccatactattcataagttttaaggagggtgatctcttttgcaaagactaaaggtttttcccctgctgcagctcatgctttgtcctactcagccagaaggagaatatcaggtgtgtttccacatggttgctggttcctgagaggtggctagtactgtgagaggagacctggatgaagagggagaatctaatgtttgcttcatggctcccaacttatcaggttacatgagttttcacaaatcacttagctttctcagagccttaattttctaatacataaagcaggaattatagtccctgccaatctcagagagttgtctatcttgtcagcaaaaatgttttatattgttgttaggagactgagaagactggcttaacaaattaagtgtagccatataatgaggtgccatagctctgtagttcactgctctgggaagatgctcagaatgtattgttttaaaaaaatactgcataattccattttatgttaaaaagtgcatgtttatttgtgtacacatacatacacatacatatttatatatacatacatgcattaaaaattggccgatactggaaggcagcacacataactgtgagtgcaatgtgattggagagttaatatcatttcatctcatttctgatatctacatttctctaagtggtaggattctgggtgacttttaccttttcttttgcagtatggaaaacaaattaataaaaagaactttaaatcttcctgcccaaactcttctcctcctaaaactatctaaataaaaatgcagtttttgtcttcctgtaattctgtctcttcctgcgtcagacctgtacagatttctttttagctgtaaagatttgtagggaatgttgacaatagtctggatgaaaatacagactactttgtaaacagaaagttcctttggccgggggtggtgggtgcccctctcagagacaggcaggcatcctccaggagggggacaggtataggctgggtcgagctgcttggatcatgtaaatgaacaactctatatagggatgcttcagaggcagaagtaccagggagttatttaatgatgggcagcagtttatctaatgattcctgcaggatacctaggatgccataaagcagtattcaagagtgagaaattgcttattctataaggtctacagcttaagccaccatatttggggactggaggctaaagggatttatcttccaagcaataactttgtttctgatggagggcacgcatctgattgtttggagatcatctgtcttctatagccacaggctgtgctcaaactatattagatgctaaaataatccagttaaggaaagcagagctcaaaacacctactatccacagaaccactggccaggtggctgccgaaggacttataagaagggccttcaggcttcttggaagacttctttgggagcaaaaggtggagaacatctccccttaggcctcgtgcatctagttataatggtaaaaaggaggtaggggcctaggaaatgggggaatcatagattcatcacagagcagcaaagccaactggtcacccaccagcctgttccttctctgaccccacagtgtccaggtaggacctacatgagcatacctcagtaataccaaatggatcaattttttttggggggggatggagtcttgctctgttgcccaggctggagtgcagtggcacgatcttggctcactgcaacctctgccttccaggttcaagcaattctgcctcagcctcctgagtagctgggaatacaggtgtgtgccaccacacctggttaatttttgtatttttagtggagacggggtttcaccatgttggccaggctggtcttgaacttcttacctcaagtgatccacccacctcgatctcccaaagtgctgggattacaggcgtgagccaccgtgctggccctaaagggatcagtttgtaaactcagtaaaccaaaacaaaaatctagctttgtgcttgattttttggtgcagtactgcaatagaagtaattcttctagtagttttggtgagaatatcttttatacttgtagtcagacttttttttctttttctttttctttgttttttttttttttttttttgagatggagtttccctcctgtcgccttggctggagtgcattggcatggtcttgactcactgcaacatccacctcccaggttcaagcgattctcctgcctcagcctcccgggtagctgggattacaggcgcccacccccacacctagctaatttttgtatttctagtagagacggagttttgccatgttggccaggctggtcttgaactcctggcctcaggtgatctgcccgccttggcctcccaaagtgttatttttccaaagacttacaaccttaattgataatgagataatctaagttaaaatctaagtgagcttagttgctatttctgattctgatttatccttaagtgtagtgtggagttcaagccattctgttttttcctttttaatgggaatctagaggccagaagggtaagttaccagcgatttagaggccaaggaggtgcaggacaaaggtcttcttccctggagtctgtcttccatcgctggccaaagaccttgtcatcatttcaggagggctctttattcccttaaaagctgctctattttattctttaacaatcccctgtttttttatttctttgatgactgatgaggtttatcatttttccatggattgactgaaaatcttcaatagttggtggctcttttcctgccttcatgagggcagcggagtgagcgtgaggcgtggtcagtatcggccatgtggggtgatgatgatcagagagtagaaccatggaggaaccttggtgatcactaagcctgactttcactcccagattaggaaaccgggacccacagagaccagatgacttgtcaataactagaactgtgattacaacctggcacttgactccgtgactatcttatcacaagggctgtggtgttttttttttttttttttttttgagtcagagtctcgctctgtcgcccaggctggagtgcaatgatgcaatctcagctcactgcaatctctgcctcccgggttcaagcgattttcctgccccagcctcccgagcagctgggattacaagcatgtgccaccacacttggctaattttttgtatttttagtagagatagggtttcaccatattggccaggctggtcttgaactcctgacctcaggtgatactccctccttggcctcccaaagtgccgggattacaggtctgagccaccgtgcccagctgggctgtgtttcttaaacagaagtactcatcataataaactatataagtaaatgtaataaattttaggagattaagttggctgttctcaactacaggacctagtctggaacgtcatactaaccagtccctggatgtactttacgtgtatgtcactttcccacaagttgagtgccttcatctattcaactgaggtttcttaaatattaataatcccactcatagtattaattccaaactgcaaagtctcagaagtacacatgatgctgaatttcattgcccaagttgtggttaattacctagtgtatacttcattctgagagaattgcccttcattgctatttgcttattttcccttcttttgtgctcaccccataacccagctatcattcatctcttcattagttcctgtcccatgcttgtggcacagggtcatgcagagcaggtgctgggtaaatactttaccaggggagcacacacattgcccatttgccagagaagaagcaaaagagcatgatgcttttgctcagggagatggtatagagagatggtttcggagaaaagtggcgttgaaagccaactgagactgtgacagcaatgagagtttctaagcttttgcattagaataacattttcaccactacagatccaatagcacagaatgttattcactgtcacgtttgcctatgaacatggttggatgtcttgtgggtatattacagttagcatatcctcctccccatgtactctccatgcatccagtatgtggccccaaatcttggggcaatgcttgactgccctttctctcacctagtccttcagcaaatcctgctgcctctgcctttgaaacaggtccccagtagaaccacttcccaccatctgtacaactaaggccctgggccaagccactgtcatcactcaactggagtctgcactgatcctctaccctgctcccttcctcaaccatttattctctagcctacagcagattgagcctttgaagatttcatcagatcaaatgacactcccacttgaattgcaaagtggcttttttagttttatgtagacggaaaccagagctcaacagggtaaatgctctatgtggtccagctcttgagccctaactgacatcctgagtctcttcctcttgacttgcacacgcgcacactggcttcctgctgttcttcaaaagcagtgagcacatccctgtctcggttctgtcattgggtttgtttcctcatctcaatcaattatctgatcaaatgtcacctcttcagaaatgcctacttggcctccacatctaaaggtggtctccttagtcacttggtccctctctatccacttatctttttttttctgagacaggatcttgctctgccacccaggctggagtgtagaggccaattgtagctccctgcagcctcaaactcctgggctcaagggatccttctgcttcagcctctcaagtagttgagaccacaggtgttcaccaccactctggctatttttaaaattttttgtagagatgaggtcttactatgttgcctgggctcatctcaaacttccagcctcaagaagtcctcctgccttggactcccaaagtgttgggatagcaggcatgagccactacacctggcctctttttctttgttgaatacgttatacattcattcatttatcatgtgctcacctccacccaccccctagattgcagcctccatgagacaggcattgggtttggttcactgtttctactatagaaaataaacatttgttgaatgaattactgggattatctgagaactgtatttcagtgattaaaattcctgttaaaacccataaaactgaaagggcattggcagcctgcagatggtaagacactagggcttgtcctgtcattgccattggacttgtttgtgttgctgttcccctgctcccaccccacccccatttaaaataaaatgttatcaatagatttcacttgaaagtctcttggaagactccaggattagtcctggcaccaggttagaagatgagagccctagatgatgtgttttcagagcaagtgcagacagtttgcattgattctggacagcattaatgtctgcatatttatctcctttacacagattcaagaacccgtatcactctcccacccagtcctctcaaaatggaaaaattccaaagccctcaggaaacattagctgtaatttgttgtatcacatgacttacaaattgcccaggagaagcataaattgtcaatactacttccagaagggttaactttattaatatttatgattagcctctgaatggtatcgttcagctttttgactttcttttattcatgggaggtacataaagcaacttcttttcaggttgaaaatactgaggcatatacaaagtaaagatatttgaaaggaacaataagccaagccatattttgtgcttatgatttgtgtttcttcatgagtgatgtacagtcttgagcacttttgctgcttggaattgccatgtggttgaaaacttgggctatctcggggggtggtttagaacactggattccagatcaagtaaagccatttatcagaactttaattatgaagtattgaggtattgagtttctttcacttgcttgtcatctttgcatcctgagaccttcttttgtccccagtttcccattaattcttggccatttatggagacaggtgtggtttagtttcccccagtttaggctgagccaggtgtttcattcatcttcagcctgttggtgtaactgagtccccaccttctacaaagctggatcctaactacccaggaatgtttgctcttattttacttcatttctcccatttccccaaatgcctggcttctaagtcctgcctttttggtctgggcttgacactggccagtttctttaccattttggcttccatcttcttcatccatagatgagatagttgtattggacaacctgtaagtctattcatttatgagcaggtgaaagtctggtattattaacttcatggtacagatgggattaaagcctctttaacactccaaatttgataattctatagcccaattgttcaatttagacttgttaggataattattctagctcagtgattctgaaacttcggtgcgtaggactggaagtttatttacagtagagatttctgactcactatatttggggtggagcccaggaatctgcatttctcagaagcaatagcacaattctgatcaggaggctgctggctgtgcctctgtgcttacacagtgtctgcctcagcagggatgttcaccaaatgttcattgatttaacttatgcatagcaaatctcaagtcagtattaaaatctttaagcataaacagatatacagtggacacagtatgcagtcagttttactgtggaatcagttgattggcactcaagtgtctgaaagtaaaattaactggtgctctgtgtaccatgatcccaggactccttgctaatgctgtaagcttcagattttacctcttacacttctcatacccatatgtccaataaactctcatttccccctgttaacagactctctcaacccgcctattccttcggtggcttgcttcaggaagcccattaattctcccattagcaattagggaaccaaggtctccctgaccaggacatagctcccaatgaatacataccctcagatgtggaataatgggactctgtatcaaaagatccccactgtcccgtaataatgcccttaacatttgcatggaactaggaaaggctctatgttaaagcagcatcagctgacgttttcttgcagtcttttaaagtctatggataaatggcagtaccctatagaaggtaacaaatagggttttaagccttgcagtgccagaccttcactgagaaactgtggtctccttggggacaaggctactctgcctcctctagatctagtaccgtaccatgttaaaggatatttttttttccaaaaagttaaatcataactctcatagacatagcgttaaagagagaactgggaagatgttacaattgattccaggcagaatgcaaagagcagatgcatttgtagatcaaaaagaatgaaatgaatgtgcaaatagaggccaaaatggcatcttccacagtatggtgggagcaatgagctgagctgccacctgacagcatttgcatgtctacagacaaggatgattttgtatcgccttccgagatccacaattcgcagagctcagacaatgaaatgctagaatcaaatatcgcagaagggtgtgagttcaacagttcatcattttctattgaagcaccaattttccttgccttgattatatgtacttgtgtttaacagtcagtttgtaagagggaattcatcctaagttgggctgctctgagatttctcatctgggtctttgtgtcaaaaacagaaccacatcctctaatgaagggattcttaaggtagtgggctggaagagggggaaaaaaggaagagaagggagggggaagaaggatgtgtcagaatcatcttagaaccagggccatgtgtgtgcatatgtgtgtgtgtctgcgtgcatgtgtgtgcacgcacgtgttgaggaaaagctccacatactcttgctgagatatgtgactgctctgaagttttaggttcccattgtcatcatttagtgcagtgactccaggcacttggccctggaaactttagttctagtcttggtcagtgacttgcacccttggggctttggtccaatcacttaactccaaataccctcatctaaaacatggagaaatactgatgttgctattgtaggggagtagaatctactttcttttcctcccccatcactaggctcatggctgaggcccccatctgttaaaaaaggcaggttaataagagaaaagcatacacgtttcatgtaagttttctgtgacctgggaactttcaggagtgaagacccaaagaaacaaggaaatatatttttatgctgttttagcattttttatgctatttttaggccattttgactaatgcccaacgcacttactcactgggcagctggagtttccaggaacagaagaagtgccatgatgcaaacagggaagagcccctgaaaaccagcagtgaggtttttatttgttctcataaccgtaatgttttagtacaagtgttgattctgtgcaggtgtctaaagaattgatataatatcttgcttcagggaatttatatcaaattggaaatataagattaacgattaggaaacagcaagtgtgagagtgaaatataatcaagggctattaagtggtgcaatgtgaatagatgatcattactctaggtggtcaggaaagagtgctctgcaaagaaccctggcccttaatttatattttctgacaatgcacatgcaggcagttgtggctctgattctgctgacaattgaaaggaacagagaattgaggcaggtgggtgaatagttctagaaaggaatacgatacatacttcaaggaaaaatgtatgtactgatggtgggtacattatcttcccagagctctaggcgcttttattgaagggtttctgtgtaaaatcagtcacagactcagcgttcagacttaatattgggagcatctcagattttgatttcattttgaaagatagggagagggcccaaagggagtcctccttgtcctttcaggcttctttctttctgtaatttacaaattcttcatttgtatttttttaaaaaaccacttgaaaagaaccattttagaatgaattggccagaagaaggttaatacagacaggaaggtggcacagcggggctccgtggccatcaaagacaaggatgaagtgggaccaggtggccaggagtggttttggctagagcagactcaaggctttggaagaggctgtgcctccctggttagcattttaaaaactgttctctgggaaatgtgacatccttgagcttattacattgaacaatagataggcttttagatgcaatttggtgactacaaaataaaatttttggtgataattgaaatgagcttcatatttgatttgtaaaattcaatgctctcaatagctaatgcatgcagggcttattacctaggtgatcggctgatctgtgcagcaaaacatcatggtacatgtttacctatgtaacaagcctgcacatcctgcacatgtatcacagaacttaaaaaagaaaagagttcaatgctctcattcgcatggtcacagatagttacctataaatatttccggaatattgatggtaggaatcgatatccatgcaggcaacttgaacacaagaagctcagtttcatttgagtactctgttctgttcttagtaagctcaagcattaaatgacaaatttaaggtttaactggtgtggctataaacagctctgtacaaacctctacctactttaagaaattacttccatgggatgtcttcctgaggttattttatttcaaccatgccttccctttatttctaaagctttgattgaggttctaagactgtgcatgaaatacttaggattttgtctgttgtgtaaagtgtgatataattctagatcaacagagagctcacattctttagaaatattactaatcactttgacatagaaagcacagattaaaaatcatttcgcatagagtattcccatagtggtcctagcattgcagtggataaccagatacttacttaggagtacattttgttttctaggtccttccagagctccattctttactatgtgtgagacacagaaactgtccttttcacatttttaaacgtgtttctctaaaacttgtagtctctcctcttttaaattttttttacagtcagggtctctctctgttgcccaggctcaagtgcagtggcatgatcatagctcactgtagcctcgaacttctggacttaaatcatcctcccacctcagccccccaagtagctaggactacaggcccatgccactgcacctgggtatttttaaaactttttgtagagacagggtctcattgtgttgcccaggctgatcttgagctccagggctccagtgattctcctgcctcagcctcccaaggactgggattacaggggtgaaacaccgtgcctggcccttttctccttttaaaagagaagtaaactatatggaaacttgaaaattacacaagcaactattagtttttacttgtacaggactggaagtagacactagagaaaagaaaacaaacatggagtttgatctatatagcctgcagtggccctacgtggtgccaagcaaattgctgcagatgaagcaaccgtgtgtatgtatttgatgccaaattccacggcttggcaggactgataaaggcaacatcagatgaaagttctctttgaggatatttccatttctttcctttttttgcttctcttaaattcatcagcatttttccatatcatgcagtacctagaacagatctgctcgttacgtcctccctacctcagtcccaccagttatgaaatggtgataagaaacaatgcttgaaagtgatgaaaagaggtgtagggctcaaaccctgagctctggttttcagaaaagacaaagcagtatcattgccccctcttttttttctggcttgttcctatagtattgtttaaacagacaaaaacacttatgactcgagagtaataatataaataatttcttaaggacttagtaaatacatacagaggcatttttgaaagcaagtatgattgatcttagtaatatattttggcacaagcatttgcttaatagactaagaagtgtttatttttaaagcattgacctgtttgtaaggcttcatgtcaggccaaatgtgaggtttgagagcacacacttggaaggctccactggctctatttagagatttttaaaaggtccccattagaccaatgagttaaaatccccgttgacattgtagtcttctgtcaataaacatccttgccttccctgttttgcttttagtacagcctttttaaaaaattaccaaaagatacttgcatatattgtcataagaaactcccattactattcatgcttttaataaaacaatgaacttgaccttcacacgagtcagcctacataacacacacagagaggctctttacaaggaaggatgtttatttggaaataggcattgcaatgggaatgtacatgccatagtgaaaactgtggtgtattcagagaggtaaagggaaaccaaagtttttaaaggaaaaaatgaggaggcttacataattgtttgaaatagttatccttggctacaaagatcagtaacaagagtgctacctgtctgaggttgcacaggctgttgctggggcaaatgtccttacaaaagtattattttgtgtcaggttttgatagctttgtgcatggttgtggtttttgcagtttttggtaatagtttttgttatcaggcatacatgaatgacagccctctcttcatggccttccttggctctatttgtcagggttatcttaacattagtgactccattttggttctgacaactttcacgtgtcttctttcactgctccacccccaccgtggcatcatgacggaaggcatcaacttccaccctctgactcttggacagatgggcactggcatcacttgagcttcactttcagtgctctttctaggcctttttacccacacgtagccttccttcatttttaaaaaaattaattagatcagattaaacattattagcaactttctttttctcttaatgtatctttgatagctttccttatttgtatatgtctaccctatcttaaagcagtataatatatctcatagtgtgtgtgtaccaaggcaatgaaatgaatctgcgttaataaacttttaggatgtctggcttttacaaagcttgctgagtgatccttggtcatgtgcatttttgtgtacattttcgaatatttttgtatgatagaattctaagggtggaatcgggttttgaattttgtagtacacttccatgtgatttttttctaaaagctgtaccagtctatatttatatgacaatctacgagagtacccatttccacttagacaaagcagcaatgaatatcatcagtctttttaggttgtgcaatctaaaggatgtcaaatgtgtttttaattcttataatttgtgtattacggactactgttaagttgagcatctttttataagttcttggtcaattttattagttggagatcagatgtttggcatagatctttccttacaacaatataatttaaggtctactagggactagtaagcgcttgggatttagagattaaggaggctaaatgtctccctttaaggaatctacaagccagtgaacagcaatgaggtgtgtacaaataattctaacagtgtgagttgtgtccactgacagcgtgggcaaagtttaaagagggatgtgaggatgaggatttcagagggtcaggtttgagccaggttggaagatttctccaggtggcagatggggagggccatcaacaatgtgaaattgtcggcacacggtgtcttagaaaggcaagttgtcctgcagggcttggtgtgggaaatagagctgagaaggggatcgtggaccttctgtgacatgctcaggagaagaaacctcttctgtgggcccagcagagggtctgggaatcctgttctcactgcataaagtgcttattattatctgttataaatatgtgttgaccgaagataatgattccatgtttccactcacctgcttggcccaatatccattcttcccattcttgtgtcctttcttctatagcagatcattctaacacatggcagtgttgtttcagccttagatgctctgtaatcacatcatcaacacaggtgggttggcgttccagccaccttccaatataggaggaagttaattggtgattcccttcttctctcctctgagtactgctcatgatctctgcagggacctctgagcaggatgtctcagtcataggcatatatttaagtctaactgctgttaacgcttaatagaaagtggtttgtaaaacacattaaaatatttacagggttcctttgaaacatggtgataaaacactccgccaaacttctttttggaaacaagttcacttaaaccgttcaataaagatggcttggccaggcgcggtggctcatgcctataatcccagcattttgggaagcccaggtgggcagatcacctgaggttgggagttcaagaccagcctggccaacatggtaaaaccccgtctctactaaaaatacaaaaattagctagatgtggtggtgggcgcctgtagttccagctacttgggaggctgaggcaggagaactgcttgaacccaggaggcagaggttgtagtgagccaagattacaccattacactccagcccgggcgacaagagcaaaacttggtctcaaataaataaataaagatggcttgatttatgtcattaaagatgtttcctgcaagttttcctgatagatcatgtgcatttcagtgatgacggtggagattcattttgttttctagctactagtggtttttaaagaggtaacgacatggcacatcacttaaaaatgaagaaattggctgaagtacacaccctgaaatatatactctgtgtgtaagtctcagtacataggctaccctcttttcttatactatcattagagcacttgggttccattactgctgtgttttgtatatacattttgctttttacagtgcctccaactactgctcaagatcaatttgctcctatttttaatgctagaagctccccccagcaccccccaatgcctgaaaaaaattaactaggaaaaacatcagcttctagtactggatctctagtacttgcaagacgtcataaatttgaaatcatatagtatgcagccttttcagattggcttctttctttccttttttttttttttttttgagatggagtctcgctctagtactggatctctagtacttgcaagacgtcataaatttgaaatcatacagtatgcagccttttcagattggcttctttctttcctttttttttgagatggagtcttgctctgtcgcccaggctggagtgcaatggcacaatctcggctcactgcaacctctgcctcctgggttcacaccattctcctgcctcagtctcccaagtagctgggactacaagtgcccaccaccacgcccggctaattttttgtatttttttagtagagacggggtttcactgtgttagccaggatggtctcgatctcctgaccttgtgatccgcccgcctccgcctcccagagtgctgggattacaggcgtgagccactgcgcccggccagattggcttctttcacttagcactatgcatttaagcttcctctatgtcttttcatagcttgatagctcagtctttttattgtggactagtacttctttgtctgaatggatgacagtttgtttatccactcacctactggaggacatcttgcaagaagcaacaccatgaagactgtagaaagatcagtggttgccaggggttgggggagggagagatgaatgagtggagcattgtgttaggccattctggtgttgctataaagaaacacctgagactgggtaatttatagataaaagaggtttaactggctcacagatctgcacacagtactagaagcatggtgcccgcatctgcttctggtgaggcctcagggagctgtgacttatggcagaaggaggagcaggagcttgcccatcacatgacaagagtaggagcaagagacagagtggtgggggaggtgccacacacttttaaacaactagtttcacatgaactcactcattagcatgagggcagcaccaagctttgagggagccgcacccctagacccaaatacttcccaccaggctccacctccaacactggggattgtatttcaacatgagatttgaggggacaaatatccaaactatatgaagcacggaggattttgagagcagtagaactactctgtgtgataccattatggtggctacatgtcattatacacttgtccagaccatagcctgtacaacacagagtgaaccctaatgccaactgtggactttagttaataatgtatcagggccgggcacggtggctcatgcctgtaatcccagtactttgggaggctgacacgggtggatcacctgaggtcaggagtttgagaccagcctggccaatatggtgaagccctgtctctaccaaaaatataaaaaaaattagctgggcacgataacacatgcctgtaatcccagctactcgggaggctgagagaggagaatcgactgaatctgggaggcagaggttgcaatgagctgagatcactccactgcactctagcctgggtgacagaaccagactccctctaggaaaataataataataacaataataatatgtcagtatcagttcatcacttgtaacaaatgtaaaacaccagcgcaagatgttaataaagggggaaagccagagggggtgtgagagagtatgtgggaactctctacatcaggggttcccccaacataggaaccaggctgcagagcaggaagtgagcagtgggcgagctagcacgtgaagccttatctgtatttacagccgctccccatagctccccattactgcctgagctccgcctcctgtcagatcagcggcagcattagactgtgcatgtgagggatctaggttgtgtgcaccttatgaaaatctaatgcctgatgatctgtcactgtctcccatcacccccagatgggaccatctagttgcaggaaaacaagctcaaggctcccactgattctacattatggtgatttgcataattaattcattatatatcacaatgtaataataatagaataaggtgcacaataactgtaatgtgcttgaatcatcctgaaactatccctccacgcccgggtcatgggaaaattgtcttacatgaaagtggtccctggtgccaaaaaggttggcaaccactactctacactaactgctcattttcctgggagcctaaaacttctctaaaaaaaacaaacaaatggctgagcacagtggctcatgcctgtaatcccagcactttgggaggccgaggcaggtggaacatgaggtcaagagatcgagaccatgctggccaacatggtgaaacctcatctctgctaaaaataggaaaattagttgggcatggtggcaggtgcttgtagtcccagctacttgggagactgaggcaggagaattgtttgaacctgagaggcagaggttgcagtgaaccgagatcgagccactgcactccagcctggtgacagagtgagtctctgtctcagaaaaaaaagaaaaagcaagttggctgggtgcggtggctcatgcctgtaatcccagcacttgaggggcggaggagagcagatcacttcagcctagtccttggcagcatggcaaaaccccatctctacaaaaattacaaaaattagccaggcatggtgatgtgcgcctgtagtcccagctactcagcaggcttaggtggaaggatcgcttgaacctgggaggttgagcctgcagtcagctgtgatggtaccactgcacttcagcctgggtgacagagtaagaccctgtctcaaaaaaaaaagtctgttaattaaaaaaattaaaacttaaaaaaaagaagtgggcacatttatctggtcctgtgacaaaaacatttatgaagcatgcctcagtttccaatctttacttcctacagagttctgcacacttggtgccaccattaccacaccgaccactacttcttggtgttaacttgttctttcagtaaatgcgaatggagcaccgaatgctagatgtgctgggttcgaggatgagccatagtgtctactccttgagatcttagtctattgtgggaaacagacttatgaacacatgaatggcacttaaacccctgggtgtgatatttaaagatatgaacaaagtgctgtgggaccacagggaacaccgtctcaccctccctgcaggagtcaagaggagcctctgagagaagggcatgtctgacctaggtgtgttttaagtgtgaggaggtggcaaggtgtgtgtttgttggggcaatgctcgcaagtataacagacccccaaatatataatggctcaaacacgtcagccttacatgttgctcatagaatggctcagcaggcagcccactcgcaagcaggatttgggaccccagggtctttccaatgttgcctcatttctatgcatcagctggagaaaaagggagagaagtggaggcagcacagaggcgtgatggcctctgtccagcctggacatgtgtcacttctgctcaagtccccttagtaagagctcacagcacgaccccagaacaggtctgggaaatgccccccagctaggcagctggtgacactgctccaggccatggaaagggaggctgaagattcctaagagatagtgagtgctatctgctgccataccaggggaagtagagagttaagtctaaagaaataatctagtggccgggcaccgtggctcatgcctgtaatcccagcactttgggaggccgaggcggttggatcacctgaggtcacgtgtttgagaccaggctggccaacattgtgaaaactcgtctctactaaaaatacaaaaaagttagtccggtgtggtggtgggtatctgtaatcttagcaactcgggaggctgaggcaggagaattgctggaacctgggaggcggaggttgcagtgtgccaagatggagccattgcactccagcctgggcccataacagtgtgactccatcttaaaaaaaaaaaaaaaaaaaaaaaaaaaaagaagtaatcttgcatgttcactctttggaaggactctccgaattctgggggattcaccccattctccccaagaaggaaaatggtcagctggatggctgggtgggtggagtggaatagttcttcatgctgcagtcatttgtacccttgaatgtttccctttcaagtgtattaattattaaagaaatgagtcaccttaatagactgccacataacgtgtgggaaacccggtggttccgcaggcacttggtaccagtggggagatacacattcctcacaagcttgggtgaagttgctatttgagggggcaggaggtgtccctttgagcccagctgggaaaggccttgtctgatgcgctgaggcatttaggcttcctcgtgtgggccaggaggaggccacagcattgggcagggagcgctctccagggcttggagccaggggtaagacattggtgacagggaggtggcctgggcaggagtcagcagggtgcagtggtccaggctgggaggatgaggttctgaaggagagggatggctgtggggattttgaggaggggttgggcttttagacagtttggcagtgaaacaaggaaggtttaggagccagcaatcacagagggagaaaatcagtcatggctctgatgtttgggttttgagcccttagataaatagtagatttgcagaaaggtaaacaattccattcccgttttagagagctggaggagcagtcaggacctccaggtgggggtgtctagtaagcagctataaatgtgggctcgggtccatgagagaggtccaggccccagcctacctcagaaaaagaggctgtgacctctggcgaatgtgcagcctgagacgggggctgaaatgcaactgtgggggcgtctccggtaagggatggacatgggggggcccgtgtggaggggcaggaaggaaacaaccacagtgtgaattcctagaagcccaaatagggattgctgcaagaatgggggatgccaaatgctgcaggagttttgtaggagcaggagtggttgtgcacggctggatttggcaaagacttgtcattgacctcggcagagcaatttcagaagatggtagcagaaggccactgtagtcgactgaggagtgaataatgatcagactagaggacagtttgagatgttttgagaggcaaatgaggggataggtttttgttgttgttgtttgtttttgtttttgttttttgagacatagtctcgctctgttgcccagactgaagtggcgaaatctcggctcgctgtagcctccgcctcccagtttcaagcgattctcctacctcagcctcctgagtagctgggattacaggcgcccaccaccatgcccagcaaatttttgtatttttagtagagacagggtttcaccatgttggtaaggctggtctcaaactcctgaccttagatgatccacccgcctcggcctcccaaagtgctgggattataggcatgtgccaccacaccctgccaaggtagtttatagtggtcttttaagcatgattataactcaagggaagaaactggttaatattgtcactccttgtttaagtggctattccttcctaaaacacacacacacacacatatatatacacacacacacacacataatgggtgtgtgcatatggtctgtcttctggttattttgataacatagcctttgaatggattagaaaacctcaacattgttaagtacacatttctctaaacagattttattttatttgtttatttttttgagactgagtttcacttttgttgcccaggctagagtgcaatggtgtgatctcagctcaccgcaacctccgcctcccagattcaagtgattctcctgcccagcctcccgagtagctgggattagaggcatgcgccacgatgcctggctaattttatattttttagtagagacggggtttctccatgttggtcaggctggtctcgaactcccgacctcaagtggtcagctcgcctcagcctcccaaagtgctgggattacaggcgtgagccaccacacccggcttctctaaacagattttaattgatgaattctaatagtaacttttacttcggcggcggggggggaatctcatacaattatgatggaatgggaattgattttctttcccctgagctctggaaaacaatttgagattatccaattctagcactagcttgatttcttctaactaagcaaccttattttttaatgtgaaaaaattaatatgagttgcttctctgtaaagtgtgggcttgtattattttttaaagcttacctcttgattaaaatataagctacatacagaaaattataggaattaatttttttgtttcctgagctataaattacatacattaaattcattttagtatattcacaaaggtgtgcagccatcacaattatctagttccagaacattttcctcacccctcaaaataaccccatacctgttaacagtcactccccttctccctgtctcccagctcctgaaaatcactaatcaactctctgtctctaaggatttacctattctgggcatttcctttaaattgagtcgtatggtgtgtggcctttgtgtttggtttcttttacttagtacaatattttcagggtcatctgtgtagtagcttgaattagaaccttattcttttatttactgctgaataatattccattttacagatatcccacattttgtttatccgtgcatcaattaatgaccataattgctttttaatgttttcattttaaagatctggggcttgatttgtgcatgaagaaagctacggtagccagtatgagcccacctcgctcagcacaggagccagggcagaggcagcactggggagtttgccagtttacctcggaggtccttgtgtgtccacgtgtttgggtgctcatggccagaaaacaacttttgtgcctcatctacagtgctcccctagggaataggatgtctctggggaccctggcatagaacagaaaccccagccactgcatgtcaggtgacattctttccttggggatctttagatttgcataaacacggagtgagcgttttcttctggtgtgaaccctgacttctttagtttgggggctttgatggtttctaccaaaatcctagggatgtgcttgtgggctggtgggagggctcagagctcctaggcaagggcaccccagttttatgatgttccatgaattgctgcaagcctctagcctgctcattttcttcctgtcatttttttttttctgcagatgatacaaccatgtttataaccatgtttacacttctcaaagggaagcagtctcagaaaaaactcccttaggatgcataactaggtgaactcctggatgtttacatgttctcaagtggtagatgttctttcatggagcctggctgttttattcaatgtatgtgttttatttctactagaacagagttcatgagagggtcagtttgtgacccgtgctttccggcacatgtgttgtctaaagagacacagccacacatggggttttcttggctctgtgtggaatggggagtagttagcttcagtgaggctccttatgtacttttccacagtttggagaaatctgagttagtctgtagaatggcttctatttcttttaaatctgatctgtgggagctgagttgctgcaaggtctgtctgcattcctaagccttggcactctgtctttccacgatcacaggtcaaaggcattttcccataggtttcttcctggatgagtaggggatgggaaaggagagaaggaagtgttatggactatctctgaaaatcgcagttgtgtcctgaaattcatttcaggtctgtttttcttttccttttgttttgttttgtttttgagacaggctgtctttctgtctcccaggctggagtgcagtggtgtgatcatagctcactgcagccttgaattcctgggctcaactgatcttctcacctcagcttcccaagtagctgggactacaggcgtgtgccaccattcatggctaatttttgtattttctgtagagacgggggtcttgctttgttgctgaggctggtcttgaacttctgggctcaagcaatcctcctgcctgagcctcccaaagtgttgggattgcaggtatgagtcatggatcctgacctcaggtctgtttttcaagtgctgtttgtatacacggaagtgagtgcacatacttcattcttgtgtttcagatgaaatgcttagttccacacacaactatcctgcattagaaatcacatgcttctgttcacagtagcaaagtcatagaaccaacctaagtgcccatcaacggttgactggaaaaggaaatgtggtatttatacaccatggaatactacacagccataaaacagaatgaaatcatgtcctttgcagcaacatggatggagctggaaaccattatcctaagcaaactaactcagaaacagaaaatattgcgtgttctcactgacaagcgggagctgaacagtgggtacacatggacataaagatggaaataatagattctgggggctccaaaagagtgggagtgctgaggcttgagagattacctgtcaagtacaatgtttactatttgggtaatgggtatactagaaacccagtccccaccaggatgcaatatacccatgtaacagacaagcacatgtacccccgaatgtaaaaaagaagaaatctcgcgcttgttgggagcagaaggggaatattggtcatcccctctgtggtgcgaggaattcttcagagatggttagcgctgaggctcttggtgcctgtagcttgcattcaggacactgacccacagtttgtcatttattcaggactcatacctgggctccctgcctaaggtgtgatgagaagcatgagcctctttttcttatccactttttttcttttctctctctttttttttgttttttgagacaatgtctctctgtgttgcgcaggttggagtgcaaaggcgttatcttggctcactgcaacctctgcctcctgggttcaagtgtttctcgtgcctcagccatccgagtagctgggattacaggcgtgtgtcactacacctggctaatttttgtatttttagtagaggtagggttttgccatgttggccagtctggtctcgaactcctggcctcaagtgatccgcctgcttcggccttccaaagtgctgggattacaggcatgagccactgtgcctggccccactttcttttcaagcacagtagctgccccatcacagaattaaaatacgattcttttttattttcccgtgttccccagcacccagccccatgcattctattgatgacttgtctctcactcttttttcatttttgcaccacatgctataagaggtatgaagtgcaaataggcttgctgcatacttggtattttctccagcatgcacgtgttctattggtatggacatatcactgcattactgacacaagtatggcttgtgtagcatttcacatctcatcttgtctcatccctggatgatgatggcgttaatgagaaagaaaccatggaagtgcttcaggccctctgctcttcttgggatctatgcatccgttctgtgctggggcaccttgagttcttatgtgttcatctgctggagactgatagaaaacagcagaagtcttctgaactctaggagttcctgggcataggaaatcttttttttttttttttgagatggagttttgcttttttgcccaggccggagtgcagtggcgcgatctcggctcactgcaacctccacctcccggtttcaagcgattctcctgcctcaacctcccaagtagctgggattacaggcacccaccaccatacctggctaatttttgtatttttagtagagacggggtttcaccatgttggtcaggctggtctcgaactcctaacttcgtgatccacctgcctcggcctcccaaagtcctgagattacaggcgtgaaccaccgcgcccggctggaaatctttaattatacaatcaattaaatgatgtgggctatatttgcagggagagaaagccagtaaagcttaagttttgtttttatcaacataatcttcgtaggttctttcttctggaatcatctagcctcaagcgcaaggtagtacttctcaggtgtaaatgtcactggaattgatggcataagttacttcttgtttttatgttgggttttacgtgttgttctttttcttttctttctttttttttgccttatttgcacagttaatggatcttgtggtttttttctccactgagatatacacttattgtattatattgatttatgtccctgctcttcttcaagaggcctgcataaggaaaatataatgtagactattaattttagaagcaatcatggaacaagaatcttatttatgcttcccctaaattttattttaaactgtagactaaaatgatcttatgaaaaatgtcacgcagttaagaaaaagcatcgtgtgtgtgtgtgtgtgtgagtgtgtgtgtgtgtgtgtgagtgtgtgtgtgtgtgtgtgtatgtgtgtgtgagtgtgtgtatgtgtgtgtgtctttcagactaaatttaagccaccggcaatctttttattgggtcatagccataaagcttcatctttttttttttggcttgttaatagattttacttttttcattttaaaaaataatttcaacttttattttagactcagggggtacatgtgcaggtctgtcacatgggaacagtgtgtgaagctgaggtttggggtatggatgatcctgttacccagacagtgagcacagcacccagtaggcagttcctcagcccctaccccgtccccaatccagcagtcccagtatccattgctcccatctttatgtccacgtgtactcaatgtttagctctcccttacaaatgaggaggtatggtaattggttttctgttcctggttaattcacttcagataagggcctccagctacatccatgttgctgcaaaggacattatctcattcttttttatggctatgtagtattccatggtgtatatgtatcacattttctttatccaggccaccactgatgggcatttaggttgattccatgtctttgctgttgtaaatagtactgtgatgaacataagcgtgtgtctgtttggtagaatgatttattttccttggggtatatactcactaatgggattgttgggttgaatggtagttctgttttaagctctttgagaaatctccaaactgctttccatagtggctgaactaatttacattcccaccagcagtgtgtaagcacccccctttttctgcagccttgccaacatctgttgttttatgacttttttttttttttaacagagtctcactctgtcacctaggctggagtccagtggcacaatcacagttccactgcagcctcggcctctcagggttaggtgatcttcccacctcagcctcctgagtagctgggactacaggtgcccaccaccatgcccagctaatttttgtattttttgtagagatgaggtttcaccatgttgcccaggctggtctttaattcctaagctcaagtgacccaccagcctcagcttcccaaagtgctggaattataggagtgagccaccgtgcccagctgttttttgactctttagtaatagccattctgactggtgtaagatggtatcttattgtggttttgatttgcgtttctctgatgattagtgataatgagcattttttcatatgcttgttggctgcttatatgtcttcttttgagaagtttctgatcatgttctttgcccactttttaatgaggttatttggaatacttcatcttagcaccagagctttcaaagatgccttaagtcaaattccaagatgacttggaaggtgtgcccataaccttctcaatcagattcagaattaatcaattgatggatttggaacaaggtttccatggtcctgacattgctactttaatagaaaccctaatgtttacatattttgctccctcctcctccagggatatgttcttgctaggaaatctgatgacttttcaacagatcaaagctcttatataaagtcagttttcaaagcttttgaagttgtgttaggttcaggaaatcagtgtaaataaaatcaatacgactattttaaaataaagcttttccgtgtattgctggagattgtatttagcatttctaaaagattcctgatggtaacaccttaccatcaaacagaattaaagagtcatgtatcttttagagtcagtattacaaatggattttaaagaaaatatgttaagggaagctcctgctttatctgaagtctaaagaataggtagggagaaagggtgagagcatgtatacgctgctttggagaaggagtcagacaaattttaaacaaattgatatcctggaatctttataatacccaaaatgattctttgccactggacaacctccaatttggatataatactatatgttgatgattagataaggcagccttatttattaaggctttagaaaacaacctttagaaaacaaccctttcccttttagtctttttctaattacaaactatgttcataattatttttattgtgtttgtattgttttaaagtcttaaatcagtgaatgtccttagggcattctgtgacctttagtagatttttaattgtgagatagttcaaccatgagggcagatgagaaatgaggaagggtctgggtaggaggttgacaagccagagatgtccagtgaatgtcagagaggagcctacctctaaaaaccgccttctcttattttcaaaaaagctttaaaatatattatcaaccattcatgatgatttccattgaaagattttcactttctacaaatgatcaaagacagtaagagatgaattagaaaatgtaatctctgctgggcaccatggctcactcttgcaatcccagcactttgagaggccaaggagggaggattgcttgaggccaggagtttagatgagcctgagcaacagagacctgcatctctacaaaaaaatacaaaaattagcttggcatggtggtgtgcacctgtagtcctagctactctggaggctgaggtgggcggttcacttgagcccaggatttggaggctacaacgagctatggttgcaccagtgcactccagcctgggcaacagagcaagatcctgtctccaaaagaaaagaaaaaaaaagagagagataagaaaagaagaaaagaaaagagaaagaaaagaacatacaatccccatctcccagctttgaaccaagtttgttagtaaattcagcctagttggctgggtttttatttctatgttacttgttttatttcatttcactttagacctttttatggaagaattttttaccccatatgcctatgtgacacggtgtgtcataaatgaaaataaatgagaaaacaaaggataagagaaaataggagtaaaggacaggaagacaaaatcagaggtcagagagaatatatttggctcagaccctttaagaattcaaagtggaaaggaggcatgatccctcacgagaattagtgtccattagaggagataaattctgctccagagacatcgagctatttctgatactgagcccagtattgaacttctcccttaggaatccaaaaaggtgctgtgatacagggccacatcccccacaacatccctgaagaaaacgtagcgacagcctgcctggggtgtgccacaggacctggcaagggcagttcggggtaattcctgccagtgtttcaactcaggggctgtcagccaggctggtggccttggtgcctgcagggtgtgcctaatagggaggcacctgaaatcttcccgggaggcaggaaatgcttcagggtcaaaaaaaggacatcatggagctttgctcaccctcccgtagatctccataaatgtctttgtatgagggctccagactctattagggcattttaaatgaaaaaaaagtctgttatattgccatcatgttcaaggataatgtatgtcattgcctttgcacacttgcttgctgcttgtcagacttttaaagctttctaccacttgttttgttggttttaactagacacatttgccacatatggttttgttaaacatactgagttgggggacttatatatgttttctatgtaaatgttaaccaaggccaggcacagcagctcatgcctgtaatcccagtgctctgagaggccaagggcaggaggatcacttgaacccagaagtttgagatcagcctgggaaacattgtgagactgtctaattttttcaaaaattagccggtcatgatggtgtgcacctgtagtccccagctacttgggacgctgaggcaggaggattgcttgggcccaggagtttgtggttatggtaagctatgattgtgccactgcactccagcctgggcagtagagcaaaaccctgtctataaaaaaaaaaaaattaaaagttaaccaaaagttatcatattgagaggtcactgcaggctatggagtttgagtattaaaatccaaaggtcattttatgagagaaggttaacaagggagaagttctgtggggtgcatgtgccatccatctgtccttcttcttatatgatctggagggggtgctagtgttggcgtaacttaattctgcatgaagatgcaggtcagcagaaagagctctacacagatgctggggaagcctggctctcggaggtggttctccccagtaattttctcacaggctctaggaatgaatcatctggtgttactgggaaagtaagcaagccaaggagaggtcccattagtttagaacttgtgctgtcaggatataccactgagtgtttcttccttcctctttcttccttcccctttttcctttgctaatttggtaggtgaaagtccctccctgccattagacattgctccccctcgtcctgtataactctctaccatccatcctacgttacttgtactcaagaactatgccaggtgaactagaacaggacggtcgcagggcataatgtaattcccccagattatcacaggatcagccttcagatctcttaatacttagaaacgtcactgctgcgttgtcttcatgtaaagggtgtaaaggaccgaacaccatgcctctcacccgcggctggagaagatattgctccataggtaatagacacgtctgcaaagttttaaaaaatgtatagatgcagtctacacaaggcatgggtgaaagaggacaatgtgacaagcagtgatttttttgagcagatggttacctgtagctaacaatttttcaatccgatgccttctaggtatggattataggtcatatagcttagaataaagcaaacacagcctagatgattatttatggagttctttttcagtttgtaaatgttagccagatatatttttcaatatgttgagacccttgacgtagctttttgcattcaaattatttagatgaatacttaaaaggattacatgatatgtagatagcaggaaatccagcaattgtatgtgaaaatggtctaatagtattctgtggtcttggaataggttctctgcttcaggagtcatcaaaaggaaaactataaactcctgattggggatcaggatgtttctgttactttaaaattatttttctctcccccagtttgttttcaggctatttatttcagtttaaataccacgcttaatttttgttaggtttttaatttgctcttacagcttagaacagtgatgaaatggctgctaaagtatagaaatccaaagaacataaatggaattctgaatttctggacaacttcttgtacttggtgaaagtcataactgatgaaaattctagttaggagaaaactctaaagcactgtgtgtcaagaggtattgcttttggcaattgaatgcttttgtcccaaccttaccattggaacaacaatgtcacagacttgagcacagaagaactgacagtgatttatatcaaatccatgtcatgagaggaaggtttgaggaagtcagtgcggcgtggactgtgaaatacttgaccgttctgggcttctcctggcctctcaattcattcatttatcaacctacctataacttaaggctcaggtttttgcaatctagatacaaattatgattcttttagatatactttttataaacattgttgtatttccaggaaaattgccatagtaaacaaacacccaaccctacaacatcctgcttggcatatatactttaagaattagactgtttgccttttcctcaaatttttatgcagtaaaatacacataacatagaatttactatctcatcatttttaggtatacagttcagtgggctgaagtacgttcccattattgtgtaactatcaccaccatccacctccaggacttttttcatctgtaaaactaaaactctgtgcccatttaacaccagctctccattcctgtcttctcccagcccttgccaaccagaattccactttctgtctctaagattttgactactctaagtacctcttataagtggaatcactttttgcttatttcacttagcatgatgtcctccagcttcatccatgtggaagcacgtgtcagaatttcctttcctttaaggttgaataatgtttcattgtatgtatagaccacattttgcttatccatttatccacggataagcaaaccaacttgggttgcttccacgttgtagctgctgtgaatagtgctgctataaacatgggtgtacaaatatatctttgaaccctgctttccattcttttgggtacatatatactcagaagtgaaattgctggatcagaagataactctacttttaattttttaaggaactgccatactgttttccatagcagctgcaccattttatattcccaccaacagtgctcaaaggttccactctcaccacatactccacaacacttgttattttctgtttgtttttctttttgacagagtcttgctctgtcacccacgttgaagtgcagtggtgcaattatggctcgctgtagcctcaaactcctgggctcatgtgatctccctgcctcagcctcctgagtagctgggactatgggtgcacaccaccgtacctgcctaattaaaataatttttttgtagagataggaggagtcttgctatgtcgtccaggctgttcttgaacttctaggctcaagtgatcctccagcctcggcgtcccaaagtgctgcgggtgtgaggtggtatctcattgtacttttgatttgcatttccctgagtattagttcatgttgagcatcttttcatgtgctttttggccatttacttgcatatcttctttggaaaaatgtctatgccagtcccttgcccattttaaaatctactgtgaaatatttgaccattcaagtactgtgacagagcaagactctgtcaatttgttgttgttgttgatactttttaggagttctctgtatagtctagatactaatcctttatcagatgtgggatttgcaaatattttctctcattccgtggttgcctttttcctctgtttatagtattaatagttgcacaattttttgaactttgatgaagtccaatttgtctatttttcttttgttgactgtgccttttgtatcatatctaagaaatcattgccaaattcaatagactgttttttacggtttaatttcatccttataactgtgagatggattatttttcttgttgtgccattatgtatagcaaatgaaacctactgaataaaagttgagtttgaagtgatagcaacctatagtgattaatcttcacttcagatggaattttctatttactttaacatgaaaagtttcctaggaagaagtattgccatctccttgagatatggtgaagggtaaacgtgagctttgttggatttttcctcccttgagtgcttcataaataatagaaactctgtctgacaaagtaaaaaagaaagaaggatagtaagttaattttagataaaggtaatatgcaaggtgagacaactgctgttctaagtatgtaatgtgagtggatcatacttcacaatgatcaaatagaaatgcaattttaaaaaacaaactacacatggaatgtgttatacacgcctatcatgattcaagttaaacagccatttacatgggcaatgctgagattgtagtctacattccctatccccattcccttttgggattttttgttctttacttttctctttataaaatactgcataaattatttgtttattttgtttattgtctctctttcctccctaaaacataggctacatgagggcacggaattatatctgttttgttccttgttgtggctctcatgcctagaagggtgcctggcacccagtaggtgatcagcaaatatccattgagtgatagaatattataagtaaaataagccacttaaatgataaatgcatttggcatattttatttttaaatgtcttttatttttgagatttagcataaagtatataaatgtaaggtacatacctgaatgcatttttatatacctgtgactaacacccaaataaaaatatagcctagttccatttaccccttctaggttagatcttctagatctctcttgctccttcccagacaatccccttcctgccaagtgcaatcactgttctgatttttctcatccatagattagtttgcctttgaatgtcatataaatggaattgtacagtatgcacttttttggtctgacttcttttggtcagcagattcagtctgtgagatcagtggtgtgtggtattctgctgtgtgattgatccccacctgtttatccatttccctgctgatggatatgtaggttgcttcctttttttttctgctaatgtgaataaagttcttgtatgaatttttgtggacgtaacttttaatttaccttggataaaatacctagaagtagaattaactcaatcataaggtagatgtatacttaactcttagaaaccgccaaaagagttttctaaagtggctgaactaatttacattctctccagcatctgttgcacattctggagaatgtgaggagttgctcttctttttaaaccatacttatgggtgtgcagtgatatctccttatagtttcaatttgcattcctctaatgagtaatgatatcaagcatctgttttttttttttgttttgttttgtttttgagacagagtctcactgtgtcgcccaggctggagtgcaatggtgtgatctcagctcactgcaacatctgcctcctgggttcaagcaattctcctgtctcagcctccagaatagcttggattacaggcacccgccaccagaactggctaatttttgtatttttagttaagatggggtttcaccatattggtcaggctggtctcaaactcagatgatccacctgcctcagcctcccgaagtgctgggattataggtgtgagccaccacacccggccccgagcatcttttcatgtgtttattggccatttgggtatcttcttgtgaataacatgttgaagccttttgcacatttgcttttcacattctttattgttttacatgcgttctttattttggatgcaagcatcagatacatgtattacaaatatatttttccagcctgtgatttccctattcctcttactaatacctttcaataagcagaagtttttgattttaatgaagtcaaatgtatcacattttctttctttattgcttttgcattgtgtttaagaaaactttgcctcccttggaatgattttaaaggtattaatacagttagctcaattaaaataggttgaattagatgcttttatttgaaagaataaaagcattaagtttaaacaactttgaaatctaaacccctcctgtggtacctaagctcctggtagcacctggcgttctcttcggaaattacttgcagcctcgtctcctttatccctgccctggaggatcagtgaaggacagcagctgtctcattcatctttgttttcaggcactacaatattcccagcacaaagtagccagtggttttattgactgcattcaggaatgctgactttactcaaatattgatttttaaaaaaaattttagccaaaatatacctctttatgtcctgatgtaaactcttactatgcttcttaaatagagactatgtgagaaaaataccatttgaattttacagaggaggactcattggcgtcaaataatgattaagattcctgtagatggtggtagatggtggctgggtgtggggaggagactttgggcagaataggagtaaatgcatgcacgggcttggtggattagcgaagaccaagaagggtgatggggtgagattgatgcctgcagatgagaacccagtggtggtcatccagtgagggtacaagacaggcagtgatgaggagcttgaaggctgacctccttcccagcgctactacttactgggaacctggaccggttggtcaactaatcagattcctatctatgaaatgaagtttatgtgtacaccatgggattgctgtaaatgatagcgtgcgtggagtgtgcctgagagaaacagagagacagagagagatatgggatgtgcaattatccatagagcgctgtaagtgctctgaatgtcagtgatggccttcctgagacttcagtttcacccttgggctgtcctatcagtctctgctcccctggctgtccgtccaggcctgccgtcattgtctcctgcccacccccaattcagagaaagaccagctgtgctatttctgaatgcatggctcataactctaatggtgcttggaatgccacagagaatgtatatttatgtttaccacttatctttcacctagccccctcttccccaaatgagcgcagaatttgttttaaatctcttcatgtatctgctcttcagactgctgcctgcccctccctcaccctcaaatgagaagattagtttactgtcataggcattcaaatatgctgagtaagttaatttgtaacttgtgtaactgatcaggacaaatgcttctgcctagggttccaaagcctggaaccacgcccgcagtacattgagttttttgttcattccattatcttttttggaactaaatcactttgccaaccccagatcttcttctaatgagactgcggtactgaatcatttggtatttttatgaagtttctcattgaatgaaatatttattgtgagaagaacattacaaatccaaagtttatctaaaataaatctggctatagctgaacaaaatattttttgctaagcagaaaagaataataaaaatttcccctaaatgtcatacagaagtcttagaggtttatataagagaactttgatttttataaacctaggattttgttttgttttgttttgttttgttgaggcaaggtcttgctctgtcatccaggctggagtgcaatggcgcaaccatggctcactgcaccgttgacctcccatgcttaagcaatcctcccaccttagcctcccaaagtgttgggattacaggcatgaaccaccacacctggccttaaacctagttctaaacaacaataaaacaattagaacattcctaattgcgttaaatgttaacttcaaattgctttttagactaagcaaacaaactaaaattttcatctttgttctaaataatatctttccttctcagtaaaatagcagagatatttaggttttgacaaataatttttggggggttaacctggggtttgcacgctagatcatctcaccttaattgttaagtaaaaactttttttctttttttaatcggtacataattgtacatatttatggggtacatgttattttgatatatgcacacaatgggtaatgaacaaatcagggtaattaacatatctatcacctcaaacatttatcatttctctgtgttggtgagatgggagagttcccttgaccccctcgtgggacttgtgatgggggtggctcatttacttggctgccatgctgaagccccttgtggaatgggaagctcacagggagcaggtgcaggagctggggtgagtgcctttgggcaccagtaggaacaaatccagtaccagccatggcagtgtctaggggttgtctgcaacctctggagcaccagagggcgtgtgttacaatcagtgctcttttagcatttgctgtccacagatggctaagtgttaaatcagctcagtggagggtcagggtgacagccttgtactctgccatttcagtacatgggtccttgtccagtgtccaggaagaatcaggtcacatggactcgaaggatggtgaatgcagagattttactgagcagtggaagtggctttcagtgggatggggagctggagaggggatggagtgggaagataattttcctctggagagggaggaagtcctctcagactatccctagccaaacatgtctccaaccgtagtctttgatgtccagctgcctctcaatgttcagatgcttcttttcttgccttctctgccatgctgttttgttcctctaccagtggatcttggggactttatgggcacaggatggggtgtggtgtgccaaaaggtgacatttgggctggaaaacggggatgtgaagccctcatttagggccatgggtccaggcttgagggtggaacccttgccagggactctgtccttttctacctagtattcctctgcttcctgtccatattattgggtaccttcaaaatatgctcttctagctattttgaaatatacaataaattattgttaactatagtcaccctattgtgctgtcaaacactagagctcattttaatggaacatttcagagggaaacttaaagcttagtttttgtttgaagagttttggctaatatttggagtaaaattaattttgtaatttaaaaatacacataaagtcaacagaaaaaaactgagggagatacacttaaggaaaataaatcactctgaataagcctagatcattctaatatttaatctgcccaaataacctttctgtaaaagtgggggaaatggtgtcatattttataacatgttttgtctacggtctcatgaatattttccaagtttattacatattcttttgtagcattttaaatagctgcatagtagtctcatgaagacagaggataatttaataaggctctttttattttatttatttttttgagacagagtctcactctgttacccaggctggagtgcagtggcatgatcttggctcactgccacctctgcctcccaggttcaagtgattgtcctttctcagcctcctgagtagctgggaatacaggcacctgccaccagccctggctaatttttgtatttttttaatttttatttttagtagagaagggatttcaccatgttagtcaggctggtctcaaattcctgacctcaggtgatccacctgcttcagcctcccaaagtgctgggattacaggcgtgagccaccgtgcccagccaataaagttcttaaagttcttagtaatttctgactttttgctattataaacaatactgccaaaaaaaatcctcatgatttccctaagataaatctatttagaaagatcttttcaaagaaccaattctgactttaattttcttgtttgctccttttcttattggcttcccttctcatctttctctctttttgctctcctttgagtttataatttgttcttctttttctagtttttaaagaaagcgtctttattttagacctttctatttttctaatgtaagcatttaagctatagatttctaagttatatcacacaaattttgatatttatttttattcagtttgaaatatttcctgatttttaaaaatcctctttgtttaccctacagtttagaaacgtgttgtttaattttcaaagtatggagattccccagagagctttctactattgatttgtgattgtggttagaggccatatgttatttcagttcctttaaatgtgctgagacttgttgtatgctatagattgtggtgtatcttgtggaggggtccatgtgcatcttcacttgtgggatggagtgttccctaagtgtcagctgtgtccaggggcttcagagtcttgctcacatcttgtgtatcactatttattttctttctctgtgttgtatcaattactgagagagaagtattgacatctccaagtataattgcgggtttttctatttcaacttgcagatctattagttttccattatatatctgttattaaatgcataaatgcttaggattatcaattcctgttggtgagttgacccctttatcatgatgaaatgtgcttttttgcccttgtaatatttctgtttttttaaacttttattttaaattcaggggtacaagtgcaggtttgttacataggtaaacttgtgtcatgggagtttgttgtacaaattattttatcacccaggtattaagcctagtacccatcagctatttttcctgatcctgtctctcctcccaccctccaccctcctaaagtccccagtgtgtgctgttcctctctgtgtccatgtgttctcatcatttagctcccacttataagtgagaacatgcggtatttggttttctgttcctgtgttagtctgctaaggataatggcctcaagctctatccatgttcctgcaaaagacatgatctaatttttttgtggtgcatagtatttcatggtatatatgtaccacattttctttatccattctactattgatgaacatttaggctgattccatatctttactattgtgaacagtgctgcaatgaacatgcgtgcatgtgtctttataataaaatgatataaattcctttgggtatatacccagtaatgggatttctgggttgaatggtatttttctgtctttagatctttgaggaatcaccacactggcttccacaatggctgaactaatttacacttcaaccagaagtgtataagtgttcctttttctccacaacttcgcaaggatctgttatttttttactttttaccaagagccattctgactggtctttgtgtgtgtgtgtgtgtgtgtgagacggagtctcgctctgtcgcccaggctggagtgcagtggtgtgatctcggctcactgcaagctccgcctcccgggttcacgccattctcctgcttcagcctcccgagtagctgggactacaggcgcccgccaccatgcccggctaattttttgtatttttaatagagacggggtttcaccatgttagccaggatggtctcaatctcctgacctcgtaatctgcccacctcggcctcccaaagtgctaggattacaggcttgagccaccgcgcccagccctgactggtcttaaacccctgggctcaagtgatcctcctgcctcagcctcccaaaatgctgagattataggtttgagccactgtgctgggccttgatgtgtttttaaaaaatattttgtttggtgatcattgagcttctggacctttgggtttatggttttcagcaaatttggaaatatttttccacattgcttcttcagatatttatgtccttttcctctctaacccctttttcccttgggactccaattatgtaatgcattagacccccatgaggttgtctcgtaggtcaccgatgctctgttactatttttcttctggtgcttctttttggagagtttctattgctgtcttcaaattcatgcatccttccctttgcagtgcctaatctgctattaatcccacatagtgtcgttttcatttcaggtgttctagtttccattacaaattcaattcagcaagactgcaaggtttttgtttgagttcccctctcactgtgctttggctcagaaatcattttcagctagaaagagagtgcgatcctagcactcattttgtttgtttctcttctcttggggattgcttttctatcctgcctattgtttgatatcagaaaatagttgtttcctatcccttttcctgttgtctagttgttagagtggaatggctagtctatacctccttacaccctcatggtcagaaacagaaatccaattagtatttactttgtcgatttgtgtggtaagataatgtcattttaatttctatttccttggtaattgatgtgcaattttttttgtcttttaagttagcttagacttcgtaggttcactacagtacaggttgagggagtcagttgcttggatgtcacctaacatggagttttgttttgttttacaatagtgaaaagtcaccccagaccaaaaccacaggtgtcccactgggttcagttttcagaatctcaatgtagagtttaaaaggggaaaaggtatcctttcctaaaagcaaatataccttcatggttttttttttttctttttttgagatggagtctcactcttttgcccaggctggagtgcagtggcgtgatctcggctcactgtgacctccgcctcctgggttcgcgccattctcctgcctcagcctcccaagtagctgggattacaggcgcctgccaccacacctggttattttttgtatttttagtagagacggggttttaccgtgttagccaggatggtctcgatctcctgaccttgtgatccgcccacctcagcctcccaaagtgctgggattacaggcgtgagccaccgtgcctggcctaaccttcatgagtttaaaaaagtccacaggtttgagtgagagaacttggagagcgggaaggtcacaacccagctcagatggtagacgcagggaatggaaaaacgggtgaccacccacattcccctctggcatcgtcccaccaccacgggctgagcgcacacagagcggaggtcatgtcctgttccttaggtgcaacagggttgaaggattctcaatctcttcttcaccaaaatacttttttttctatttagatgctttcctctccttgtaacattatgactgttttttttattcccgcttggctgtgatatttttgtgtaagtcaaatatcaatatagttttcttgagaaaagcactattaaagattgataccccgtttcaggctgtattaagtatacattagtaattcactggctataaaagcacttatagacacagatgtatttaagatacattattgtatgttatattagacattttatatttctgggacgatctcaaatatttaaaacagtaaatatattttttagcttcatcaataggtactgaattaagtaggtaaggttgaggcttgaaaatgcaactttaaacttttgaaattaaacgtttaatttttaaaaacttaataggaaacttttgaattaaaaataacttagggtaggctgggaggatcgctcacatctgtaatcccagcactttgggaggctgaggcaggaggatcacttgaggccaggtgtttgagaccagcctgggcaacatggggaaaccttgtctctactaaaaatacaaaaattagccatgcatggtggtgggcgccggtaattccagctacttgggaggctgaggcaggagaatcgcttgagcccaggaggcagaggttgcagtagcagagatcacaccactgcactccagcctgggtgacagagtgagactccgtctttaaaaaacaaaaaatagtgttatatgaacgtttcttttcttttctttttgaaacgaagttttcgctcttgttgcccaggctggagtgcaatggtatgatctcggctcactgcaacctccacctcctgggttcaaatgatactcctgcctcagcctcccgagtagctgggattacaggcgcctgccaccacgcccagctaatttttgtatttttagtaaagaggggtttccttacgttggccagactggtctcgaactcctgacctcaagtgatccatccgcctcagcctcccaaagtactgggagaacttttcttaatgactcaagatggtaagtgtgaatgccagggattacattgtgtctaagcagggctgtcttcatggctggggttttacggcttatggcctcgggattggcttgtgtgcttttattcttctgtgctagttcttgcctgagttgtcatttctgactagtgactagggtgcctgcctgtagccatttgttttcctctattcgtccctaatctgaggtggggttgtatctagcctattaatcttattagaaacaaatgtaaactaaatatgtgctttgcttctaaagaaagactaacgttctataagaaaagtgttttgattttgtgaagaactttctgaaatgaactacatttcttgacagggtttttgattcctaagtcccaggaggttgggaaaagtttgccagagggctaagaaataggcaggtgaggtgttaatacttagctttagggtacagtgaatttgggtacagatctgtgttttttgatagattttcctgaagctggtattgaaattctgtttccttgtttagatacaagctatgggtttcactgatgagtggggagggctgtggcgggaggaaaggaactggtttggtagttggcagcaaagaaatagatgagcggtaggatggttagtcataatgaggttgcgactgctaaactggcactgtggaatgtgtcactctggagtgaactgcatggtctcttggcactgtggagcatgtcactcaggggcgaactgcgtggtctctttgcgtttggctccctgtgttgtttgtggctgggctctctcttggcagatgtgatgtgtactttacttgctttgccatcggcatgcctgtcatcaacccaccatctagcagttgctcaagtgctgttgtcattattcaaatcaaactagaaactgtcttttcatgagtgtgaacatgtcagctggagctagaggagaagcatcaactcaggtcctctgccgagcagacagagatggagttaggagtaagagaggtttactggggacaacctctctgaacgatgaagatggggagggggtgggattgggcccagaaagccttcatgtggcgacgttgatctgatggctgtgacagaaacgagagaagcaagcagagctgggcagggcaggtctcagaccgcactgcccatccgatgggaccctctcatactgggttggcagtgtagagccagtggcacagttgccttcttaacaatggctttggccgggcgcggtggctcacgcctgtaatcccagcactttgggaggccgaggtgggtgaatcacgaggtcatgagatcgagaccagcctgaccaacgtggtgaaaccccgtctctactaaaaatacaaaaattggccaggcgtgatggcacacacctgtaatcccagctacttgggaggctgaggcaggagaatcgcttgaacccaggaggtggaggttgcagtgagccgagatcacgccactgtactccagcctcgccgacagagtgagactccgtctcaaaaaacaaaaacaaacaaaacaatggctttaactacttgtagaattttaagagatactctggtcttagaagcatcacatttactgatcttctgttagagtggctggtgtttcgcattttataagtaaatccattttgtctgtagtttgcatggagttccgtttcagagggtgttcctaaactctggagggatataatcccttgattactgcttctccccctcactgtgccccacagcaatgtctcctgatacaggggtgtggcccagcctctgactgtcagcacagaaaaagggagctctggacctgatacgagactccttgattgtggccctccttgctgctagtgcgttggcagtgtatgtagagtcgagtgtgccatagacactcagctatgattcaagattgtatgtcagacattagtgagagcttggcacctttccatcagggttctgtaatacttggctcatttgtaagtagtgcctttggcagaatggtgagctctgcccaggagcagcacaatgcttttattacttaggcctataataccttatcttcatggaattatggatcataaggatatcatactgtacaggtagtatatttggttgtatcaacttatacatttcatttcgtagctcattgatattaaaagcctttcattcaaggggggagctaataatttatacagctagaaattcaataaattcaggaagagtgccaagaatgccaggcctcttgtctttcctatccctgccaagcagtcacctgccagactccgttcattcctttaatctgcttctgaggtcaattgctgcctccttggcatcccagaccctctgacttataattagagacccttcctttgtggcaacaccttacctgatttgtatctgttataacacatcttattctactttcttgtaattttgtacaagtttccactactagatcattttggtttgttatagttggtctatcaaaatagtttttccattctctactccttgccctcctcttcagagaagtgtcgtgcagggaagcagagctaggaaggtctttctttcttgtgtgtctatctggctatggggtggaggagagcacaaactcaaaggagggggcactctgggaagtccagaccatagttgttcatgttgcagcatatgtgctcatggctttgtctcactgcacgggatgttcttctccatctttaccctttgctttggaagcttttagatgaatcccagttgctgactttacagtaaaaggcatcttaaatctctccaaccaatcacccttttccccagctggaagtactcgtctttctcttagactctgaacatccatagctctcactgtctccgcttcttccactctcacaggtgctaataatggtaatatcagtagggcacagtccacacttatacaagtggacatcttgttaactgggaaggcagacacataagcagaataattctaatgtggaaaatgcacagactggactgctgcacatggttacgttggtcatgtgagactgagaaatgtgctttctggaattgctgtctgcccacctgtgccttggggccctatgcatagaggaggggggatctaacccaacccaagagtgtgcgacaagggaagacatctcagaggagagaaagcctgggctgtgtcttaaggggtgagtagtaggcaggcagagaaccgtcggagaggaaggaagtccaggtgaaaggaagcactccacattcgaagctgtcttagttatttccacattggtctgtttcctctccagactacaagtgctttgaaagcagggagagggttttttaacttctgcgttatgcacacagaatgcccagaatttatggtgacggaatgacttcctgtctgcttgagcctttttgcctgcctccttgacttactgaattcttatacatgttcctatcttaaacaggggtgtccaatcttttggcttccctgggccacattggaaggagaaggactgtcttgggctacccataaaatacactaacactaacggcagctgatgagctaaaaaaagaaaacaatcccccaaaaactcatcatgttttaagaaagtttacaaatttgtgtagggccacgttcaaagccgttctgggctacatgtggcttgtgggccacgagttggacaagcttgctctagaatacgttaatctttagtatttgggacttggcctttcctggcttaagcacccagtaccatcactgctaccaccgctaaagcctgtgagtctggaatggctactgggatttctttttaatgcatagactctaggagtatacttttatttttaacaaccccacaaaacctaataaagataaaagattcagttagtcaacagatattttattatttcaggaaactctttgaaatgccactctcatttatataaaggtcagatagatgatttatgtaggtaaaaggacatatcaatgatcatatagataaggatcatattaatgattcttatagtaacaaaaaaatgcacctgtgggcattgagctggttgcttcattactccttgccccatttttattatctctaaaaaattatctctaaaaataagcatgctcctcatatgattgttatgaggattggatggatttacacatacagaatgcttagaacagtggtaggctcaacaatagttgtgctttttaccacactcatctatggcaccttagtgacatggcaaagacaacaaatcgacctggcaaccctgagtcggttgtggaggccttggattcagatgattgcatatgcatctctttggcagtgctcttgctttttaaagattttctcatattttaaactttctcacttctgtgtctgagaagaaaacgtgatacacaaaatgtcaactcaacaagagagtcgggaaaagccatcctactggggaagtctattttgtgtcagtggagttgggaacaaaagtgaatgagctggcctctgtagtgacttgctcaaatctgactgcatgtatttagtgggttaagactgctgatggaagtagagcattgggttcatatgaccagtgattgtaagcaaacaggacaggataattggcatgagaaactggggctatagttgaagcaaatgaatgtgtttttctcttgtacttgactgttgacttccgtctgcttggagcctccacctccccaagaaagattagaaggaatgtcaagagaaacatcaagacgtgttcatcgtatgtctttcaaaaatagcaggattaggcaagccagccttttgtttacgaggagactttgtagactaattcttctttgtaatacatacaatacttaattgtatatattaatctgccttatatagttatattataaatatctcacacttacaagagttggatggcttgactctcaacattttccacattaaagaagagatacctaagcaggttttttgtttttgagatgagggtctttctgtgttgcccatgctggccttaaactcttgggctcaagcaatcctcccgcctcagcgtcctgagtagccggaatttacaggtgcactcgccatgccctgcagaagcctcatgtgttagggcgcacctgcaattccagccactataattttaaggagtgtttggaatccagaagaatggcatgagggaagtgcattaaaacacttgcctgtttttgatttccagaaggtggagtggaaggcaggaggaggaaagaaagcaatgtaatgagatacaccttgatgtttctctccgtggggaaagttttcccagttggagagatgaggtgtgtgggataagtgaggataatactgaggagcaacagggaggtcccgttttcttgaactgcctacttgtgcttcccatgtggtctgggagctaatctgaaagctcctggggcctctctgggacctcgcttggtagggttgtggaatgaggctgacagaaggtggcagagagagcacagcaggtgctgtagtctctgcagagggagcccaggtgaggcagagccatctagggaacacagatgccctttgacaaagccaagccagaccagtcacagacataatccaaatgccagcaaggggaccagggatgtcattctgcagaccagaggaggcagaaggcatttatgtgtaaggatcccaactattccccatgcccccatctctaccctccatggatccagcaccattttcaagagagaagccagaggacgatgaagtgatttgggagctaaagcatccttattcaaggaagactgaataccacttacttaaacttttcacattggactgagctaccaacaaaactggacatttccattttttcccagctttctatacaggatgatgccttaggaggtgggtcagattagttgcagactaaatttaaagaattgcatttttctctgtccacttaagacagaatgcgaaattttgtgttcgcttgattcactcgtcaaacatgtttactgaatgccttctgcatcctatttcctggggatgcagaggtgatgaagatgagcatgggccctgccctcctggagctcctagagaatgttggaagacagaaaatgaacacacacattttatggagtggtatgtccatgcaagaaataatgtgtggtgttagggaataagtgagaaggggaatgctgtagctagggcgtggtcacaaagtgcttctgtggggaagtgacatttaagctgatgcctgagtgacaggaagaagttagttagcaaagactagggaatgacattctaggtgaagaaaaagcaagtaccaggtctctggagaaggaacagagctgatgtcttgaggaaagaaggtcatcatgggtggggttcaggagcagcaggagaggggtcactgatgtcactggggaggtaggctggctatggggttggttgcagtgaagccatgagcctttggccaagctgtgtgggtcttcaaaatgcttaggacaaggttggatgcagtggctcacgcctgtaatcccagcactttgggaggccgaggtgggcggatcacctgaggtcaggagttcaatactagtctggccaatatggtgaaactccatctctacaaaaatacaaaaattagccgggcatgatggtgggtgcctataatcccagctacttgggaggctgaggtgggagaactgcttgaatctgggaggcagaggttgcagtgagccgagattgcgccattgcactccagcctgggcaacagggtgagactccgtctcaaacaaacaaaaacaaacaaagaagcaaacaaaatatgctcaggacaggcaaaccacagcttcaaaggaaaccgcccctctcctaggttagctgttcaaagatggtgttcatgcatatcgaatcagcaatgagattttaaagctggtgtccctaacttgggccagtgttggggtcctacgagcaatggagaatgtctatcctagcaacagaggaagttgctaaggagaagtaactggacttgtatttttaaaactcaaccaatccaacccatatgaaaaattactctgagttgagtgtttgaaacatagcttttcttttttgttgttgtttttggttttagatatgaaatacatttccttaaaagcacatttgtcttcatttaatttacaggataaatttaatacatctaaggtataaaatgggttttgaggaacagaagcccagtgtatattgctgtacttattggaaacaagacttcaaattacagtggctcaactttcacccactgtgccggagccaactaggttgtaaataaagtatcaccagcacgtgtccctgctcacatgcaattacacctgcaatgctctgctttttctctgcacagccaaatcataatcattcttataagcctatttcaaatggcttcctgaatgaaattgccctgtttctttggcccccattgagactggcagccatctttgtgctttgaatttccacatttcttgctctctgttgctgtaaaaatggaagcttatgcccctctccctacccactacttcacaaaatgccttctatccaggaggtgctcaataactgaatgcattccacacccaacaatattttaaatcataaagaatccatggcctgttacttctcttttcatcttctctgatctgaaacaaagaaagaaaccaacaagtatttgcagtaataagaaatcctgacccatcagtgtcgctttccctttgtgtttatttcttttgaattcttgggtagaagtggattgcagatgctagatttggagagatgcagtttgtgcaaaggagggtcttgaaaaggccttcgaaatgtgtctgccaaggctaaaataatcacattttgtatttgcacagcattttcattgtgtctgtttgattaggagaaataatcagcccagtgcttccccagtggctgaactgcttttgatgtgcctgtgttctgagggattataaaacatctttgtaaatatggggtagaggccatagttgaacttgaaactcttttgaggagcggaatgtatgtgtatatgcatgcacacgtgcctcatgttacgaaggctttgtaatgactgcactgttttcctagagatttttctgggggcaaagagaaaactacacttacatacttttcaagtacctaaaacattagaaaaaagacataaccaacttcttaactcatgtaataacagtttgaatacctatgtttaccaggaaatttcagctaatagaaatttaagtgattatttccttgagatgggagttgggatataatcaggttgtgaattgcaaaagaacttaatttatataagggctcagcaaaccatggcctgtaaagtaagactggtttttacgtttttaaagatgtgtgaggaagaagaagaaggagaagaagaaggaggaggaggaggaggaggaggaggaagaaggagactatgagatagagaccatatgtggccacaaagcctaaaatattcaccaactgacactttacagaaaaatttgccaacccttgatttatgtaatcgatttctattttgcagataaggaaaccaaggctcagatggtagcctgcttacctaagctcacaagaagcaacctgttctattaaaggagaatcagattcaagtttctgcagatctggcttctaatcatatcttccatttgagctaatatggttttgtgactgatagtaaggtttcccttttggctctatcgttctagagttcacagagaaatgtgtgcaatgcagttctaacaccaactacctggagtgaggtcagactttacaggttaagggcacagtcctctagatgattgtccatgcttcaacgaccagctgcaggctgtgggcttcccagaccacctgcacatctgaccaactggctacacattcagggtttcctactactcctcaaagaactcagaaaaaatgctacacttatggttacagttttactacaaagggtaccagtcaggaccagccaattggagatgcagaggttgagatccgggagggtcctgaacatgaagcttctgtgcttcaagatgtgtcacttcctggcatactgatgtgaatcaccaacctgggaggctcccctgagtttcagtgtccacaagtttttattggggtttcattatgtgggattattaattggatcattggtcacatgaattcaacctccatccccctttccccttcccagaggttagaaggtcaggcttaatcaccctgctgaaacccccaaccctctaaccacatgattggcctttctgggatggctggaccccattcttaaaccatctagcaacccaccatgagtcatcatcttagcaggaactcaggtgtgcacagaggggcccaccatgaatagcaaagatactcctatcactgcgaaattccagggatttagaggctcccttacaggaactgaagacaaagaccagacatattattgcacaacagtgtccaagccgggtctgactccaccttgacttttcattctgtgcgtaaggagcacagttacagactgactgacgtgggacggcctgtgtgactggcgttgggaggaagacgagggtggcctgtgtgactggcgttgggaggatgatgagggtggcctgtgtggctggtgtaggaaggaagatgaaggtatttctttctgaagtgtttttttttttttttttgagataatgaaacttttttgccagggaaataacctagacatgtctcaagcaccttttggagttttaaacattttgaattaagttagggtgaaaatactgcagtttggagtgaaggattttgtttctgtgttacttaaggcaatgaaacagtaataatttgcccttatgctaactcttctttcatgtttaatcccttatttgaagttcttaactccctgacctatttagtttatgcttttatgtatgttacataaaagttatcataaataaactaatatatacatacatattattataatatttaatgtattggaacaaatttcaaaaacctgtcagcatttttcattttcttcctcaaaaccatctccatggaatttgtttatgcaatggatagaaattaggtgttgtcctcacttttacctgctcccctgacaatgtaaggtccatcattgtccttgcttcctcgccagtgacttccacattcttattgccacgcacacattccaagtgagtgaaacgatgaggaatttgagtcattcagtaaaatgaaaaacatgaccaatcatgtggttagagggttgaaaatatgaaaatatatgttttgtacaatgaagtgaacaaagtgcatggaggagacatcaaccagagagctagagctggtggaaggtgagctgctgactgagtgtccctccccttccaccccctcatgcttctgtgggtcactggtgtatctactgtaactgatctgctctcctctgcccttccctgttcttcacctgtcctcttattgctggtctctggtgggcattctctaccatctctcttgatttcctaacattctgttctttctccaaccccgggcagaaactctgaaggcaggaggaggaggacaggggtgcttatctcattagtcttgcacttcccacccactttggggcttcatcaaaacctactggcccagatattgctgtgaagactttcctctgccagattcagcctcctgggtctggcttgtagcatttaacagcatctgtgctagattatctaaaatcctgggcacctggtggtgatctacaggtgaataggaatttgtccctcctctttaaccctttttgcttttccatcttatagggaaaaacaggttctctgcatactgctttaccacactagttaagatacgtggttatgagaagtttatagaatgatcaagtggtggctcatggaacccaaaccccctaatgcagctgggatctcggagaggactggacctaggacccaaaaaactgctgcctcatctctatctaaaaaaaaaaaaaaaaaaaaattcctttctctgtctcctggtccactcagagggtagaagacggccatctagagacctggtgtgtatatgttaataggtcagccatatgcagaaatggtccctaccagttcccatgtcaaagttcccagaagagagacccttggtggcccaatttggaccaagtaaccatccctggtccaaagagctgtaacaagtagatggtattgcacggtatgacctagctgatgggctccctggcttgtatgaggaaagaggtctggttcaagggagacagagaagggagcagctggttcagcggctgggcaggtacctaaaaggcacctactacattagcctcttatgtattcatttgacatattctttcagactgtctactgggtgctaggcatgatccagggcactctatccagggatagagctatgaatgagacaaagtctctgccctcacggccttgaccttccactctcttgtctgcatttccactttgcagggtgggggcaaatttagtgcttttctctttgcttactcttgttctctcagttctttcccttccctttggtttctttctcagctaatagatatttattgaactcccactctctgctgacacagcacctgtttaaatggtggaggtgtaagcatatactcattttatgtggtagtatttgcaaaatgcattaactcagaattatctcatgaaaccttagtcataatgtgctttgctgtagatggtgtaatgtttccttaggcaatatgttttccacaaattttttttgaaaatttttttttctaatacagggttaggttgagatgaggccactgaggtagaaagaatttatctgaatcttggggacaggtgcggggtggtataactatttctacctaggaaaaaatcccaaggttttccctgttgtggtatagaaagctgtgttgacctgaagcatgctaggtagataagtgggagatattattccacttcattctgtcatcactatttactcgtgtcaataatttttttcactccaatatttgttatccaacatctaaattcttgtttggaaaagttattgttcctgttatttatcagtgatttttttttttttgtcccagtcttcttcaaacctcagtggtcttgtgtttcttcctttcctggtgcacacatttaaacctcacctccccagaaatcttgcagagttttctttctttctttctttctttctttctttctttctttctttctttctttctttctttctttctttctttctttccctccctccctctctctctctctttctctctttctctctttctctctttctttctttcttttttggtagagatgaggtcttgctatgttgcctaggctggactcgaactcctgggctcaaggcatccttcccaacttggcctcccaaagtgttgggattacaggcatgagccaccatgcccagctgagggttttcttttcagatgtttcttatgtccatccttttatcccaacctccatttaattcatgcttttatcatcttgcttctagattgtagaattaatttcctacctggttcgcttatctaaaaattctcctcttctgctcttccccctttgccatcactgccagatgctcttctctcctgctcagaaacttcctgtggcctcctgtgaccttcaggatgaagttcaagcttctttgcttggcattgagtcatccacagtctggccacaggctattttttttggtgaactttttttctactttttcccagtttggaccctcagggttgatttgttttttttagttggccctgatacaattttgtctgcttgggcctttgcttaagctcttcttgcccttgcccacaatgcccttccctttcctacaatgcccttccctttcctaatccacacctcacccacattgccaggctcttctgtctgtactcagaatctattccaccacctgccctcccagcacaaagaggctgctgacctctgagcctccttagcacctttgggcccactcttagtcacacactggtaagtaaccatggttacacctttatgccttaattgagggaacattttcaagggcaggaacctgatcttctgtttttgtgttctcagcggcatctaacaagtgatcctgactgggtgctcatcagcatcacttagtgatctttagaagcaaaacacagtgaccacagaatctgagagggcagggcccgggaactaatacattgtggaagctgcattggtaatactaatgcacaggggaactgagagccgctaggtgagcaatgaaccactttgaccacgcactgttcagtgaacccagcctgtccctactgtcctggagcttgggcttctgggtgcagtgagacagagcatccataaataaaatcaggtaatgatgatatctggtactgtggaggaagacaaggcagggttagtgggcagagagaaaagcagtacttccatataggctagcttcaaaaatattctccatctgtcttacatcagcaaatgctccaacacctggccttccctgattgaagtccgggagccccagctggtgggccagacagtctggaagaagggattcttgctctctgctgccgcttgttgatgagtagacgaccaagcagtgtcccatggggagccagaaagaccccagagagtgggaggttggagggaaggagatgagggatcctgtctgagtgaggaatagccagggtgctgtgggcacacgcaaaaagcaagaggaaaactggagtgtgcctggcctgtgaccagggacctggcttgagccccggagcctgcacccactaggcgtccccatctaggtgaagggagaagccttagcccacttcagacttaactcttacttaatattcggaataatatgtcagctttcagtaaacgagtttacatttcgcttgtccctttcttaggataaggattatcatccttctaatcactttaaaaagatgatgtagcgaaaactttctctttaaaagtgtttctctatgacagtgaaaagtattctttgtaacagggaagtgaaggtttacttgcgtaagatgtcagtttttttttttttttgagacgagtctccttgtcgcccaggctggagtgcagtggcgcgatctcagctcactgcaggctccgccccccggggttcacgccattctcctgcctcagcctcccgcgtagctgggcctacaggcgccctccaccttgcccggctaattttttgtatttttagtagagatggggtttcaccgtgttagccgggatggtctcgatctcctgacctcgtgatccgcccgcttcggcctcccaaagtgctgggattacaggcttgagccaccatgcccggccaagatgtcagttttttaatggtgtgcaacgtccgtttctttgatagttggaaagcgtggcaggtattagagggcgaatgtatatttaagaaaaacaagataagtcttcatctgtagagtattaatttttctgtgatcctttatctcagacgcctctcctctgaaggtcactgctcaagctgggcagccccttctaagaagggatgctgccttggagttggagatgaggttaagatctacgtgcgggtaccagtttcagtaataactggatccttctctaggtctaggctggaacgtctcaagtgaaggttattggggggcaggggtttgggtccacccaaaaaggcttgacccataggactgaaatcaaatcttgagctaggctggcttgccacgtaaccacagaaacagtaatttaagcaataaaatgaaagctcgagcgctggtccagagctggggttgggacagctactgcactcaggtctccaggtgcatgtagggagaagagcagcggatcccttgcagacaatggtgggagcgagctcttcaccctggggtctccgaagcccatttttagcgtccagaggtgtgctttcgccatctccttctgcggtggctgcttgcagggcgcattcccattgctgctgtctctgttcctaaggaagatcaaaggatcccagaaaacccagttccagagctcagttcccgggactagagggtacgctcggccagatggctgggggtgccgctggccttggcgcccccgccgtccccgcgcggtcgcccaccccggcccgacaagcagcttgggcgtccagcccggcccggtccctgcagggagggagcgcaggagctgggggcggctctcccggggcggggctcgctccacaagcgccaggggccgcgcggggcgtgggcgtgggcggggccgggggcggggccggccttggctgccgcggcacaggcggcggcgtctccagggggagccaaggtacgtaggcggcgtccgcctcacccgagcatccttccccgccggtggccgcccgcccgcggcccgcgctcgcagcctcccgcctggcggttgacttctttgtgtcgtattctctgcctgcgccctgtctctgcaggacctgttcgttcttctttgggctataagaaggcagaggatgagatgtcccgggccacgtctgttggagaccagctggaggcacccgcccgcaccatttacctcaaccaaccgcatctcaacaaattccgcgacaaccagatcaggtaggagaaggcggccggctcgcgcggaaggcggtggagtcacagctgggaaggggctcgtcctcctgcgcggggcttggccgcgcacctggccggcccccgtccatctcccccagagccttcccctgccccctccccaccccactagcccgcggtgcagccccgcgcttccagtagggtcatgcgaatgcagccctcaccgttctctcctgcgcatccgttctgcgcccagcctgcctctgagccctgagaagttttcactctaatgtcaccgacaaaaacgaggtctctgctcttttcatccctgggcttccttctcggaaccccttctagccttgttttaagccagttgatagccttctttagcaatttttagaccatactatgggggacgtgcttcataagggaatcccacaagtcacaaggaatcacattcagttctcagtggtccacgacaattgttaagaggtcttcatttgctgcgaaactttgcccagagttagcagaaagatggacagaagctagcgtttaaatgtctacttttgctggccgctatgtcacacaccctggctatagcagcttagtgaatcttcataacctattgaagcaggccaggagactggaatataaagatgctaaataatgtacctatagtcatacagctcctaaatggcagggctggaaattgaacccagcccatctgactactaaggataaaattttttctgctgtgcaaagctagttctttatcacgggtgttcgtacattttcaaatttcattaaactttcaggcttaaacaactttgtatctgggagagacttcagaggatgtagttctgtgagctgctcagaacaccatgcttgggtgtagagaagttcagtgatttatcaggttacacatagattattgacaaacctgagttccaatccagtgttcttttttggaagacaaaaactttgttgttatatgtttaagtattccactactgcactaacacttgtacaaatgacttagcctgacatctttatttagaaaggtcaggcagttggacattattggggtagaataatggtgcatattatatggaggtggaattttcacttattaaaggagtgttagattatgcagctttattttgggttttaagaatgacagttgggcatattttatacttaaaagtgtaatttagaagaatagctgagtccccatttcagaatgtgtgggcttcgtttaagatacagagcatcagtcgcagtgagttaccacttcacaaactagggtggctccaatcaaaaagacaaataacaagtattggcaatgatttagagaacttggtatcctcatgcattactgatggggatgaaaaacgatggagctgctttggaaaacagtaaaaatgatggagctgctttggaaaacagtttggtagttcttcaaaaggttcaatgtaaagttaccatatgacctagccgttctactcctgggtaatctgcccgagagaaatgaaaacctacgtccacacaaaaactcatacacatatatttcacagcagcattattgtgaatagccccaaagtagaaataatctaaatgtccatcagctgatgaatgaataaataagatgaagtatatccatacagtgcaatattattgggccataaaaaggaatgaaatattgacacattctacaacatggatgagacttgaaagcattatgctaagtggaagaagccagtcacaaaaggcctcatagtacatgattccatttatatgaagtatccagaagaggcaaatttatagagttatgaggtaaattagtggttcctggggctggggaagagagaaaaggttggggggaaatggggaatgactgtgaatgtggatggggtttcattttggggtgatggttgcacaactctgtgaatttacctaaaccatttggaatcctgcactgctcatgtagttccatttctttacaccttctcgcatgtgtttctattgaattgctttcaaaaagatgattttctaaaagatatatactgtataaggatatgggatttgaagagctacttttctttttaaactttagtgtgttttcaagatgtatttttgcttaatttctattaattcctttaattttgttatccatttatgcatgcttaaggctgggagaaaaaaaaaatagaggcctttgtttttgtctaaattcttttgttttaatggaaggtaaagttttttttttttttggagatggagtcttgctctgtctcccaggctggagtgcagtggtatgatcttggctcactgcaacctccgcctcctgggttcaagtgattctcctgcttcagcctcccaggtagctgggattacaggcgcctgcccagctaatttttgtatttttagtagagacggggcttcgccatgttggccaggctggtctcaaactactgacctcagaggatccacctgcctcagcctcccaaagtgctggaattacaggtgttagccaccaggcccagctggaaggtaaagatttttaagagcactgataatggagcttcactacctgttctgtaatcaagattgaaagctgacccagactgattgtattattagtcagagggattccgagtagctgtctgctgtgcagtttcatctgtactgttttgagagaggcagagtaagttggggatgtacagtgggttggtgaggaataaagtagtcagttaccagctattgtattgaaagctttatgtaagtatataattgaattagttgaaatatattaaaattcatataatttctgagttcatggcttatactgtgagcgtaagtttccgcatgcactggatagggtctaagaaattaaaatgtggtccttgatgttctttaaaatggcctttgagtatttggttcgccttgactctgtgtttaaataggaattactaatggttatcagtgacttgtagttcattaaaaaattggttgtaggccagatgcagtggctaacacctgtaatcccagcactttgggaggccaaggtgggtggatcacttgaagccaggagtttgagaccagcctggccaacatggcaaaaccccatctctaccaaaaatacaaaaattagccgggcgtggtggtgcttgcctgtagtcccagctactcgagagactgaggcacaagaatcgcttgaatccaggaggcagagattgcaatgagcccaaatcacaccactgcactctagcctgggtgacagagcaagactccgtctcaaaaaaaaaaaaaaaaaattgattataaagcttcttagcattatggtttaaggatttgagaaaacgtcgagccatattattttagcactttaatgttactgaactcaagttttatgataatattgatttttaaaaataaggccttttatcttggccatgaatgtttgctaaaagttaatgaagctattcaaaggaatatttttataaaaggataaataatttgttttttaatataatttttctggagaaaaggttaatggttttcttagaggcagggcatggagagtttatcccagttcctttgcccctaaattgagctttttgaaaagaagggaccacatgggatagatgaggctcaggcctgtctgctgactcagggctaacttaccttgttgtactccttggcaggcctgtcctctctggaacagagttctctcccctactttcctcaaccctaagccagttttggtttgaaaccctctggatcatagcagttgctctgcgcttgcctttctgggaagctggcatttgactaggaatgggagtttgatacagaggaagggagggcagcgaggggcggcatgctgtcattcaggacaggaattctatggatcaagtttactggaatggaattgatgtgactgaagaaagatggtgggtctagggaaatgcctagaaagcaggagtgaggtcccctctgaggtccattgtggcctcagcacccccaggggtatgcactacatgagaactctgaattctggccaattccttgaatttttgggagggactgtgctatgtatatagatgtctcaccaaaccttgttctcattcttgacgctgaaaataccaccagtgtttgatctgaagtctgtggtaggtttattaagtttttcattattgaagccaatgaattcagattatcataatgatggagaattatgaagtagtctttttctactagggattgattttctaggaccttaactatgagaacaataactttcttcatcctctggaaatgaatagtaattaatgggattcaatgtttatatacatatgtaagattatgtatgtgtccacctaataagatctccttttcctggagtgtacaatcatatctcctttcaaatgttttaaaggttttagtgcacaattcagccatctgaagtatacaattcagtgatttttaatatattcattgtgcaactatcatcacagtcaattttggaacattttcatcacctccaaaagaaatattatactctagctatcatctcccatcccttcctccccccacccctaaggaaccacaaatttactttatatttctgtagatttccctgtactggacattttgtataaatagcctcatatccttttaagttaaatattaaatgcttacaaaagctcactatttagaggaaactggtggtgaatttttaattttatatatctaaattttcaagaatgtttaaagttaaaatgtttttttcccccagaaaaatcttgaaataatgtgctgatcaaaggaatgagcaatacttatgtcatcactatcagacatatgtaatctttctatgtgattagcagcatgccatttgaaatagtgaatttcaaagccataaggcagttttcttcaatatttgaaatgaggtcttcaaagctagttaggaatgtttatagttactcagttttgaatgactcattcatttcaggtgggcgttttagctagcaaaaacttcattacagtggtaactcgagctttgtcaagttactgcatttcttcaggttggtttgccttaaaggaaaattacttcatacaaatttttggtaagtttttgttggctttgccaaggttaattttaaatagaatattacctttacagggccaggcgcagtggctcgcgcctataatcccagcactttgggaggccgaggtaggcagatcacgaggtcaggagattgagaccatcctggctaacatggtgaaaccccgtctctactaaaaatacaaaaaaattagctgggcgtggtggtgggcgcctgtagtcccagctactcgggaggttgaggcaggagaatggtgtgaacctgggaggcagagcttgcagtgagcagagatcacaccactgcactctagcctgggcgacagagccagactctgtctcaaaaaaaagaaaaaaaaaaaaagaatattacctttacagaaaaaggaattgagcactgtatgctaggttggtacagtatcattgtttataatattaatgctgagatcctaattttttttttaaccttgttttttggttgttttgttttaatttatattttaggttcgggatatgtgtgcaggtttgttatataggtaaactcatgtcataggggtttgttgtacagattatttcatcacccagatactaagcctagtactcaatagttattattattattattatctgagacagaatctcattctgtcgcccaggctggagtgcagtggtgcaatctcggctcactgcaacctcttcctcctgggttcgagcctcagcctcctgagtagctaggattacaggcatgtgccaccatgcctggctaatttttgtatttttagtagagatggagtttcaccatgtttgtcaggctggtctcaaactcctgacctcaggtgatccacccgccttggcctcccaaagtgctgggattacaggtgtggctcacacctgtaataggccactgtgcccggcctcaatagttattttttctgcacctcctccttctcccaccctccaccctcaagcaggcctcagtgtctgttgtttccttctttgtgtccatgagttctcatcatttagctccctcttgtaagtgagaatatgcggtatttgattttctgttcctgtgttagtatgctaaggataatggtctccccctcattccacattcccgcaaaagacatgatctcattcttttttatggctgcatagtgttccatagtgtatatgtacattttctttatccagtctgttgttgatggacatttaggttgattccatgtcattgctattgtgaatagtgcttcagtgagcattcgagtccacgtgcctttatggtagtaggacttatgttcctcttggtgtatacccagtaatgggattgctgagttgagtggtagttcggttattagctctttgaaaaacttccaaactgcttttcacagtagttgaactaatttacactttcaccaacagtgtgtaagtgttcccttttctctgcaacctcaccagcgtatgttatattttggctttttaaatagccattctggtggtgtgagatggtactcattgtggttttgatttgcgtttctctaatgatcggtgatagtgagcatttttttcatatgtttgttggtggcatgtgtgtcttctttagaaaagtgtctgttcatatcttttgtccactttttaatgtggttgttagtattttgttcttataaatttgtttcagttccttataggtgctggatattagacctttgtcagatgcatagtttgcatatattttctcccattctgcaggttgtctgttcactctgtttgatggtttattttgctgtgcagaagcccttaagtttaattagatgggatcataattctaaaagaatatttttgtcttaaggagtaaaaagaacaaaataatcttcagtaaccaatttgtccatgaatagtggggagagattatatatgtggtactagatccaatgtcattgagtactgtgaggatgaagaattctcctctaaatgttttaatgctgcagaatttatgtaggatctggtcttaatgcacaagctgcttacaatttagcaaagaagcaataccagcatcctagttagaatcataacttttttttttttttgagatggagtctcactctattggccaggctagagtgcagtggcgcgaactccactcattgcaaacctttgcctcctgggttcaagcgattctcctgcccctcagactctcgagtagctgcgattacaggcacccgccaccacggccagctaatttttgaatttttggtagagaacggggtttcaccacatgggccaggctggtcttgaactcctgacctcaagtgatccatctgccctggcctcccaaagtgctgggattacaggtatgagccatgacgcctgacagaatcataacttttttggtttatgtaaagatcattatcttaaaaaccaaggttatgtaatctctgatttgagactgctgtctttatcaagtttggcaaaggtaaaagtattccttatcaagagtaattgctgatgttgaaaacagtctcaagattttccttctgggtatgctgctttttgtttagaagtggatatacttggttaatttccaagccaggcactgtactttctgaacgtgaatggcacaacaatcctgagttcttattttcgatgtaccagcagcaattaatgccatagaagagtcttgtaatgagaactgttatcacctttacacccctggacaagtcttttgaggaatcctgcagacgaaaatattggaactgggggagctttggcatagtacattccaggtaaccattgaatgtgtgagctttcttgaagagtatttttagaaacagaaaagcctgtcagcattgggccagttttatatttggtgtttctaaggaaacagcaaatgtctaagaggacagactttcatggtgatttctttatcaagttgacccctgtgtgggtggataatggagcccagtttgaatttgaccaaaaaaaatctgtgccatttccactgtttaaaataggtaaaagcatttggtttgagaattttggtcagtaatttatttcccctctctcctcttcccaaattctgttaactcttattgtctgctgtgaacttggaagcatttatgatttttgattaaaaagaattaagcatcaggatttgtgagacaaattaaaactcaaccagaattggaagagacccaagacgtgacaagtaagtactgtgtgggtccctgaattggattctggaacagaaaagacattggtggaaaaactggtgaatcttgaataaagtctgtaattggattagcattgtgccagtgttactttcgtagttttgacaattgtgctatggtgatgtaagatgctaacattgtggggaaactggacgaaggatagatgtcaactctattatttttgcaactcttctataagtatacagttttcggccaggtgtggtggctcacacctgtaatcccagcactttgggaggccgaggcaggcagatcacctgaggtcaggagttcaaggccagcctggtgaacatggtgaaaccccgtctctactaaaaacacaaaaattagccaggcacggtggcgggtgcctataatcccatctactcaggaggctgaggctggagaatcgcttgaacccgggaggtggaggttgcagtcagcagagatcgcaccattgcactccagcctgggtgacgagagtgaaactctgtctcaaaaaagaaaaaagtatactattttctcaaacaaatcttaaaatcaactagaagtatctgagagaataggaatgaaatgctaaactcttgtttttctgttgaatactttagtaaatgtttggatctttaattggaaacatacatgattttgaagggaggatggtcagaagaaaaaaggatcagtatcttcatatgtttgttgtgatgagtagatgggaaaacccttactctcggggcatcaaagaacattccctatgctcacaaacagcaccaagggtttgtttgcataatgtctgatctagttgcttaagttgaaaaagtaggtaacaaagtagactgctctgtttttgctcagtttagtcatgtgagcttctgtgtcgttatccagaaagttgcatctaagtgtttgttctactacttatagctgagtcactcaacagacagcaaaagcttactcagaaatgctaatcagcaaccctttcaagagggacaatgcttagacagaacaaaaggagaggtctgaccattgtggggatgtagggatgtttaacaaagaaatttcctgaaatccatgaggttgggtttggtcattcaaatgctgacccattcttttctcttaaatgaaagccagctcttcaaaactgaaatcataggtttttagcctttactattttatattagatgtcattaaaaatgatttggggttgagtttgggatgatgttagtcactctgatggattattctatgtatcttcagtctacgtataacatataccatacgaaaggcttttggagagtgttggcaggtttcagcttagaaaagacttcagcttgagagtggacctaactctcatgtaagttctctgtctatatcagtggtctccaaaactttttcattggatgtcccatttgtaacacttttttttttctttttggagtcttgctgtgtcaccaggctggagggcagtggcgtgatcttggctcactgcaacctccgcctcctgggttcaagtgattcccctgcctcagcctcccaagtagctgggactacaggcacgtgccaccatgcctggctaattttttgtattttagtagagacggggtttcaccattttggccaggatggtatcgatctcctgaccccatgatctgccctcctcggcctcccaaagtactgggattacaggcatgagccaccacacccagcccataaaattctttagcatgaacctttgatatgtatatttaaaacattggtatacatgtgctatcattgttagttattatctgaagacccagtacatatttaccaagattctccgttaaggattatggatgtaagtacatattgttcacagtcttctctattattttgaatgcttttggccgatttgtcagatttgattaaattaccctaatgtttaacctagtaaaatggttttaaagagcttttactaggaatgtaagtgtcaattctgctgctttttattttcttgtaattgcattattaataagtataatttccaatttgtggttttgttgtatgattcttttatttttatttttatttttattgatcattcttgggtgtttctcacggagggggatttggcagggtcataggacaatagtggagggaaggtcagcagataaacaagtgaacaaaggtctctggttttcctaggcagaggaccctgaggccttccgcagtgtttgtgtccctgggtacttgagattagggagtggtgatgactcttaaggagcatgctgccttcaagcatctgtttaacaaagcacatcttgcactgcccttaatccatttaaccctgagtggacacagcacatgtttcagagagcacagggttggggggtaaggtcacagatcaacaggatcccaaggcagaagaatttttcttagtacagaacaaaatgaaaagtctcccatgtctacttctttccacacagacacggcaaccatccgatttctcaatcttttccccacctttccccgctttctattccacaaaaccaccattgtcatcatggcccgttctcaatgagctgttgggcacacctcccggacggggtggtggccaggcagaggggctcctcacttcccagtaggggcggctgggcagaggcgcccctcacctcccggacggggcggctggccgggcggggggctgaccccccacctccctcccggatggggcagctggccgggtggggggctgacccccccacctccctcccggacggagtggctggccgggcagaggggctcctcacttcccagtaggggcggctgggcagaggcgccccttacctcccggacggggcggctggccgggcggggggctgacccccacctccctcccggacggggcggctgccgggcggagacgctcctcacttcccagactgggtggctgccgggcggaggggctcctcacttctcagacggggcggttgccaggcggagagtctcctcccttctcagatggggcggctgggcagagacgctcctcacctcccagacggggtcgcggccgggcagaggcgctcctcacatcccagacggggcggcggggcaaaggcgctccccacatctcagaagatgggcggccgggcagagacgctcctcccttcctagatgggatggcggccgggaagaggcgctcctcacttcctagatgggatggcggccgggcagagatgctcctcactttccagactgggcagccaggcagaggggctcctcacatcccagacgatgggtggccaggcagagacgctcctcacttcctagacggggtggcggccgggcagaggctgcactctgggcactttgggaggccaaggcaggtggctgggaggtggaggttgtagcgagccgagatcacgccactgcactccagcctgggcaccattgagcactgagtgaaccagacaccgtctgcaatcctggcacctccggaggccgaggctggtggatcactcgcggttaggagctggagaccagcccgggcaacacagcgaaaccccgtctccaccaaaaaaatatgaaaaccagtcaggcgtggcagcgcgcgcctgcaatcacaggcactaggcaggctgaggcaggagaatcaggcagggaggtttcagtgagccgagatggcagcagtacagtccagcttcggctcggcatcagagggagaccgtggaaagagagggagagggagaccgtggggagagggagagggagagggacagggagaggaacagggacagggacagggacagggacaggagtactggtcttcatagttacttcccaatattgtttttgcccacattttctgatgggacatgcagactgcatttcccagtttctcttgtaactagcgactgtgtggccaacttcaggccagtggtctctcagaagagtcacatggcagttctaggagccctcctgagactcaacgcccatgcatccttcattcctcctccatcctgagccaggaatgtggatgcctgtatgattcttaaaccatttgttcttttgggagggttaatttagtttaaattggataaagtgatggatgactccacctagctgggacctggaaattgaaatgtgtagtagtaaggagagagacagacagggagggtaccactgttatccctgtattagctcaggctgccatagcaaaatacatagactgcgggggcgtaagcaggtgttcgtcttctcatagttctagaggctggaagtccaagatcagggtgccagcatgatctggttctggtgcgggctctctcctggcttgcagatagctgctttcttgccatgtcctcccagaacagagagagtgagcaagagcaagagcgagagtgaaggagagacagagtgagagctctctgtctctaataagggcactaatcccatcttgagggtcccaccctcatgacctcatctaatcctaattatctccaaaagggcccaacagtagcatcccatcacattgggggttagggcttcaacatatgaattttaggaaggacacagttcagtccatagcaccacccacccttcccattaaagaggttcctctccagccacattacatagaattacgttgggacaccagtgtcagtgcatttaataaatgttcctgaagcttattttttggaggtatatataaatataagctctgatagcatcttcccaaaccccacttggaagccacctgctttagattcagttgattagggcccgccttagaggaaaaccatctggtcagacccagtctgacttttactttaggccccaggaactctgagactgatcataagtcttgttccttaagtaccattcataatcctacatttggtatatgtgaggtaagcattgcagtccctctctgtcaagaattgggggtgcgtggttagtggcagcactgcaggggtgggaaagtagaaggacggggcaaaactgctagtagagaccaatgagctgggcctgaaagatgagtacgagtcagcctggaaacttgggtggggcttggtggggagggcaggccagacatggggaaccccatgtgcagaggtgcagaagagtgtaacggccaggtgtatgtctttccagaaaagatgtggaagaagaaggtgatgtggtttggctctgggtccctacccaaatctcatcttgaattgtagctcccataattcccatatgttgtgggagggacctggtgggaaatgattgaatcatgggggcggtttcccccatactattctcgtggtagtgaataaatcttatgagagctgatggttttatcaggggtttccacttttgcatcttcctcattctctctttgcctgctgccgtccatgtaagacgggacttgctcctccttgccttccaccatgattgtgaggcttccccagccatgtggaactgtaattccaattaaacctctttcttttgtaaattgcccagtctggggcatgtcttcatcagcagcgtgaaaacggactaatacagaagggatgatggacaaagtgctgtgaaaggccaggctactggagacgggctgctatagccaagaaaagcttttatgagccaggtgacaaagtgatagatagtacttgggtttgatgtgcacagccacctgctctgcatttagaataagcatatgaggctgctgtcattgcccaggaagaggtgcagggctatactgctgcaggagaagagaagcacttgggatggttagcagtggggctgtaagtggacagagcactaggcaagtgtgatttccaggttccagtgttagtgacggagaaggtgttgatgctgtttcttgtgtttctgagttttgttttgaactattttgaactgtggaatggggcaaggtgattgacctcagaatagcagaaagcccctttcaccccagtatgagaccaccccaggggagcagagatacacatgtagggggtgatctctgttggttgcgtcatgaaggagctccttcctccagcaaggtaggggcagcactggcgctcttggagagacaccaaacttttgacagatctttccctacctctagatctgtttggtttcaagatactccaattaataaactggaagtagaataatgtcatagcttacagcatgatgagaattaaatgagaacatctgggcacagtggctcatgcctgtaatcccagcactttgggaggccaaggcaggaagattgtttgaggctaggagtttgacaccagcctgggcaacatagtgagatcctatgtctacaagaaaaaaataattagatgagaatgtacctgtttaaggctgcactgtgtaagagctcacagactcacacagagttgctcattgacaccagttatctggttattacgaatgttgttcttctttgccactcattttgctctctaattctttgataaccaaaacaatcaattataagctgtaactcggggaaaagggaagtggacttgcgtattactctgcccaagagttacacattgccaagggaagaaatatgcaggctgaagaatcacaaggtaggttttgggcattagggtcttttgtacatatatgttttctagcctgtaactgctaggaacaagcaggctggactgcgagcataagatgagtctaaaatgtgtttgagagtgcatgtgtggattggtgttaaatcaagaaactggcttctccttttggtgtcgtgaaagaacacagttgcatataaattcacattaaattcactgacacctcctcctgcaaacaaacaccaaaattctttatgatagaatggttaaaaccttaaacttggtccacatgtatgactagagttgtattgaattgtgactataaagtctgcatctgtatctttctaccctccctccttttttcccttccatcttgtttgggaccatcaactttttggctctgtggggctctgctttgaatatctctgaggaacttggcactgtgcataatatggaaactgaatacttaactgtagattcaatgatataaaggaatattatttatttatttatttattttaaattttttctttttttgagacagagtctcgctgttgcccaggctggagtgcagtggcgtgatcttggcttactgcaacatcccactcccggattcaggtgattctcctgcctcagcttcctgtgcagctgggactacaggcgttcaccagcaggcccggctaatttttttgtatttttagtagagatggaatttcactatgttggccaggctagcctcgaactcctgacctcaagtgatccgcctgcctcagcctcccaaattgttgggattacaggcgtgagcgaccgcaaccggcaggaatattctttaaattattgaataaaaaatatgacacttttgtttttattccagtgaaaggtggaagttttgaaagtattgctgtctagcatatgaaacacgttaccaagctctgacagtttaaaaatagagctctttattttaaaacagtaaggccatttgctgaatagtatcacaattatttctctagtactcagctttgttaaaactgcctcatagtcattttttaatgttacctttacaaattagaattcattgaccattctaacagtgatgtaccagagtaaactgaataatttcacataatgacgatgccgtggtaaggcagaaacatgaacttctctcagtatcactgttttgactgtcagctgtcatgcagtttcaacactacacctatttcaacaaagttttgttcactgtataagattagacatagcagaggaagtaattttaagtacaggatagtgcgtgtgtgtgtgtatgttggggaggtaccaccattattctctgtacatgggtcagtcatatttgtaagccaaacaatgtggacattggaaagtcaaaaaactccaagacagaaaacaacataagggaagatttcttttcatacttttaccaacctccttccactgctttatctaaatgtgtacacacataggcacatgccatatcttttaacgcttataattcactgggcctacacatgaacatctgtcttcctgggggacacaccatttcacctggaaaaccattctagtccacagtgagctggtgttgaaagttcttcctctgcatcgaggcttcctgtgagtcccagatgatggttctagactgtggccgacgcataagtggcagtcgacccataacaactgcaaacatgtttaattactataacaaaacgttaattctcacattatatttgagttagtattggactgtcaggaatttagtagttctcttaatgtttagtttgatagtcacagacccatttatagagatgactcttcaggactgccccagggagcatatgtgacctcttcatatgttgttgggtgttctatcacattgttgggaaagagtgagttttcttatttcaccaattgacaacattgctcctatactcaacaaaaatttaaatgagggttggaaaagctttcaattttttgcccctaaaattgtacccccaaactccagtactccatattagtatgtacgaactctgaggaaatgctgagaaagctggagactatctgttacttgctgacagtcttttcctgtgtctagttcactttctgaggtccttctgtgtctagttttatggtccctttgctagtattttgtatggatggttgatgggtgcaatgtgcaatgcagtattccaaatattttttttatcatgtgtcatgcacttaagtagacaagaagctattttcaattcagtgctggtgtttgccatagagttaaatacgttttttatagaaatcaacctgtgatatttataaatattttagaagagtagattataagaaagttaactgacttggattttaaaccatagtactttttatataaatagtttaaagatattgatttagcattcttcacagccaagtatgttttcttatatatcctgaagataaatttattatgtgccatttttttgaactattgtgttaagggacatgatgaattttgatattttgagatacaaccattagaaaaaaatgaagagagtctgaatatgtagccctttaaaagaaacttatgtgctgcttactgtttgaaatacattgaatattttaaaattaggacagcatcaacatggctccacatatacccgtggaacaattgttacaacaaatagaggctgggcatggtagctcacacctgtaatcccagcactttgggaggctgaggcaggtgcttcgcctgagctcaggagtttgagaccagcgtggggcaacatggtgaaaccccatctctatcaaaagtacaaaaaattagctgagcatggtgatgcacgcctgtggtcccagctacttgggaagctgaggtggaggatcgcttgagcctggggggtggaggttaaagtgagctgagattgcaccactgcactccagcctgggtgacggaggaaaaccctgtctcaattaaaaatattaatagtaataatataacaaatagagctgtggttgagttatgcagaagtgatgagctaagatgtattatctgcttagtaagacttgaaagacagtctctaactaaaaaggtgaattgtttgtaaaacctttttgccaaggtttatgttctccataaaattctcaaatacaattttgcggagtctttgcagaatgatgtcagtgctagtatttacttttgctttccagttctcgttcgtggcatttttgtattccacaggctgtcatgtacctctcatttcctgttttgtgcatataaaggtaacttggttggcgaatcgatgatatatagatcaggtattttatttttagccttccattgcataagaaaaatctaggttcatttcgtctggggcaggctctgatttctgtttgtagccagcactcctggtgattttgctgaaggcggtcctcatttgttgtcaccctcatgcaacaatgtatagttcataggaattttttgaagattaaatgagttaatatgcatgaggcactttaaacagcacctcactgagtgctttatatattttgctgttgctgtagttgcattttagatagtgtgtttgacaacaactctcccatcaattttggaatgtaccacttgggttttacaaaaaaaaccaggtattgtcttgtattagtagagattaaaaggtaaggtgcatatcgaataggatgaatgtgtttcaggaacaaactagaaatgttttctttttgcactaacctgattttgaagattaattctagtttgcctgaggttatcatggagaactttaaattattaaacatgtaatggaaaaaacatgcagtgtaatctttctctctttctttctttttttttttgtaatagcctgagtgggagggtaattagctatagtataaggaacaaaacataacaagtacatgagtcttggctctaccagggaccaagtgaatgaccttaggtcaagtccatgatttcgctgagtctgactttccttgtttgtttgatggaaacacacttccctagaaagcatgtcgggaagctaaatgagatttcagatgcaaaaatgcctaggacacagtacagtggccgtggatatcgtatatcccttcctgtttgacaggttgggtaggcttgttgctcttttttctttcttttttctctttattgtggtaaaatacacataacatgaaatttatcttctttattatatttaagtatacgattcagtagtgttaaggatagtcacactggtgtgcagccaatctccagaaagcttttcatcttgcaaaactgatactctgtccctgttaaacaactccctgttcttcctccccgtgcccctggcagtcaccgttctactttctgtccctgtgtatttgacttctccaggtccctcatgtaatagtcttattgctcgttgatatagtaattacaactttaccattacaaggagtcttgcctgggcatggtggctcatgcctgtaatcccagcactttgggaggctgaggtgggaggattgcttgagctcaggagtttgagaccagggcaacatggcaaaaccctttctttatgaaaaatacaaaaattagccaggtgtggtggcatgcgcctgtagtcccaactacttgggaggtggaggttgcagtgagccaaaatcatgccactgcactccagcctgggcatcagagccatacctgtctcaagaagaaaaaaaccaaaagcagtcttagtactctatcacacggtcatttttggtggtgtttttgtcctttttctatgctttatctcatgtcttgctgtgtaccacagtaagcaccactttttaaaaaataggtataaatgattaaaggaaattcagatgactcccccaccccccaccccccatttttgctgtctggttgactttaccatttgcatctttccctgacaaccctggctaggttgggatacaccaggaccagggtacagagtcatagtgcccaggaggacgcttgatggggtgggtatagattttaaaccagatctgcttttttgttgagtggattgttttcatggcactggcgctggttcagtctctcgtgtctccacctgtgacagagtttccctttcaccttcccgattgctggtggttatcgttctaaaacagccaaggcactgtgattctccctgttgagggaccatcgctgcttctcttttgtctccagtaagatacacaaggccactctcgttctattcccggcttaccgcaccatctccccaggctcctcttcctgtgtctggctgcagcctttaatcacggcactttccctggaacactgtctcctaatctactcaagttcgtcctcctggagggccctgtttttcaggctcaggttgcatctctgtaagcaagcattttcttcctcgtcctgcatctccaccgtttgcaggcggaggcagcccctctgtgccgcagcgtttctcagactcttttgctctggaacttagcatgctgcaccacatctatttttatccatctctgactctcctgctctgctgtgtcatccttgatgacaaagtctgtctgtttcccctcgcatcctccccagcacgacgcacagttcctgccaatgggaagtggaaaacctttgctgaaggactgcgctctgcaagcgaaggtcagaattgaacagaaaatgagaattggcttaatgtgttgttctcagatatcccttcacacttaattgcttattgaacaaagtagaacccccatggtgatgtgcagttacttatgcctcggaaattgatgtattgtgtagtgttgatgttgtactttcatatataaactactcctaaaagggggctgccgaggtaaatgcttttaatgccaatttcttcagacttggcagatggatatctaccctcaaatggaggtacatttgggatttaatgtgacagctggcatccttagtcatttatgttggtcaaggtttaaaacttgtgtgttcaacaaatttttttatggtagtcggtgtatactgtcttggtgcttggtgttgcagcgcagtggtggaatatcgagggctctgcctgcaaggttactccttagcttttcgggtatatttgagtaagggaagtgtagtagagaacacacatgttgaatgatccatttccatggctaagttcgtggcccctttttcctcctgctctctggctcatgcccttagcctcttaaagaagagttacgggagagaaactccgagcagcctcctggcctgtttttcctgagccgtaaggtgggtgcttcactcttcacagggctagccccgtatagctttaattcccacagcactttccttagaagctctcctcgcggagcacagcacggacgggccaggagccggggctcccatgcctgaagctgctgtcctccaggagcctcagatgtgaggcagagccagtcccagctggcatctccatggcacagatgaggaaacacaccagaaagagttacataacttgcctgagttcctacagtcggtgagcatcacaggctgtgtgggatgcattagggagtggtctgcctgaggtgcaggcaataagaaggtccacacaataaaacccactaaaagtccatctgcttttaatcatctccgtgtaccagcagtaacattctcctccctgcaaaagccttcttttggactaaattctaaataattgccgtgactactaattagtttttttgttttttttttgtttgtttgtttgtttgttttttgttttttgttttttttggagaggaggtcttactctgtgggccaggctggagtgcagtggtacagtcatacttcattacagcctcaaattctcccacctcaacctcgtaagtagctgggaatataggcacacgtcaccatgcgtgactaattaaagaaaaaatttagagggtcttgatgtgttgctgtgttgcccaggctggtctcaaactcctgcccctaagtgatcctcccacctcagcctcccaagttgctgggattacagtcacaagcctggctacttttaaagatttcacatatgtatatagcagatatagtgtgtatatatataaaatatacacacatatattcttcaatgtagcacatatttattttatttactttttctttttttttgaagtgctgttggacttgatttatttcttttaagtgacgattatattctacgtggaaattcattaggagcattcccagttaaccctctgtctccagtgcccacaaccaactgaacagtacatgtgcattttgagagcaaggtcctaagagttaggacaggtctggagttccctttggacacagtgctctccaggagccccatggtgctacatattctggagttagttagtttatgtacttatttatgattattttgtagagatggggtcttgctatgttgcccagcctggtcttgaactcctggcctcaagtgatccttccagcagagactctcaaagtgccgggattgcaagtgtgagtcaccatgcccgacgcctgagtttacatagtagctatgaaatagtgacagtacagcgtttataaacactaagaaagtagaacttgagttacttcgattctgtcattttatgtgaccacgtggggttttttacatctaacatttaagatagcaaaacagagtatgaactgcagggtatgatattttgtttggtaagctcacattttagtttggtaaatttttcctagattcttacaattgaaattcattaataattattcattgttttaaaattgaagaccaagtcaagaaaagaaaatatgacattagtggtgtgatttagtaggtgtttatacctttgatagagcattggttttgttaaatttcacttattagttacttgccaattaatgacataaatattgtatcagtctgtaaccaaaggatcaaaattcaagttgttacatagatataaaaaccattgaataaatacttgtgctttattctcttttttttggacgataaaaatttttattattttatttactggcatgattagatgcagttttattttttttgtttttgagacggagtctcactctgttgtccaggctggagtgccatgttgtgatttcggctcactgcaacctttgcctcctgggttcaagcaattctcctgcctcagcctcccaagtaactgggtttaccggcacctgccaccatgcccagctaatttttgtatttttgtagagatggggtttcaccatgttggccaggctgttcttgaactcctgacttcaggtgatccacccacctcagcctcccagagtgctgggattacaggcatgagtcaccatgcctggcctagatgcaagtttaataaagactatttttgctgtttgtttcttttttggtcaattttatgttctttatagttatcactgaaagaaattttgccacatagagaagggggctgcttacaaaaaaaattctcttggtgtgaaacacactggggacatcagcaccctcagccatcatcacaagatgcccagccttgacccagtctggaccctcctactgtttctaacctttgagtgcagctcctcccaccccgtgtagttgtgtttctgtagatgtagcactgcgtcttataagccctcagtttcctactgtgtgaagggaagggctttaatgagagttttcaacgtttccctcaattctgaaatcctgtggttgaatggaccctaagctgtgctctgatcgtggtggggaaagtgtttccattacctgttggcttgttattacagtgaccgcagcccctgctgtttggagtgtctgaggcaggtggggcccagtttcctttggcaaaagaagaaactggcaagacatggaggtggtccaaggatgtggggtccgttccctgttgctttagtgcctgcacgaggagcgagggacttattccaggtttccctttgtgcttggaaggaagatgtattctccataggctccaaaattcatttgtttagacattttaattacattttttgaatctgtatttttagcctgtccaattagtcagtttgataatagcatcaatctcctgttacagctttcttggtccatttgcttgtgaattttgttttacatgttttcatgtaaaacataatttacattttgagtaaaatttaattttatgtaaaataaagtgtaccacactggtggtaatgtggctgtaatttttactctggccttatgctcattaattatttctgtcttaaacttggtggtgatgttactattttagcctttcctttctttttgctcatgtttgtgttatatgactactcataactttgtttttaattttttgaagttacataagaaaatccccacagagatcctttttcatttgatgggggcgcttaaaccatttgttggtgtaactttttggtagggcattttttgttttatgctttttatttttgcttccttggtgttttctcaactctttggcttagttgagaaagctcactgtgggattactaaacatatgcgggaaccggaagtgaagacatcagttgtcatcacgttgatcttgcagagtctgtggacattcaggtaggtgtatccagagaagttaaatatgctggtctagacagagcttgtggtagacatccaagctgggggtgaatttgataaccatttgatgagtacactggtgctaatttcagccatacatggaaaagatggttcagtgcattgaataaagaccaaaggcagaaaacctcagggatgatctctgtttcagggtcaggaaaaggagtgtggaggggaggtggcacaggagccctgggaggtgtaggggctaaccaggaaaggagggctgccagtaggtgagctcaggtgcaatgtttattgatttgggcaagaagaagagagacttctttatcaatagggtggaaagagctttgggagtcggtttgtgtgtgtgggtgtcaaggtgaatcacgtccactctaaagcttcagtttactccatgaaatggggaggaggcagagtgctcaaagtgaaggggctggggtagggcggagagtttgaggagagagaacggttggaacagccaggatggtgcatggggcagggagctgtccaaggtctgtggcaccaagaacctaggtgacatcagaaaacacatgtgggtcaatgtctgttaagggacccacttagaattgctgtgttgaataatgtacttccgtttcttaatcctttggtgattaaaaaaattacaaggaaaagatcagtctgggtctgctgcatttaattgtgtgtatagtagatgtaatctccaaggtgggcggtgggggtagttggagggatcgctttgacctttctgccactgcagagactcctgctgccaatattgaaacaatcataaatatcttattaggtttcctgggaacaaagccatgctgcaaagggtatgaaagcctgtttggcagggatgaaggtaggaaggattatatgaaaagagaggagactgtggggacacagcccgcttttctgtttgtttgcctgcttgtttgtttttatgaggggcaggctctgtggtatctgcatctatattttagaagcgcgttgctgttgttctgatattcacagggccttcatctgtgtttaaaaaactgaaaacataaggataaaaactgatttgaagcttctgacatttttataattgttttcaaacacagttaacagcatcttcccttttactgttttggacaccttctgtccgaatccttctagctgtgagcgaattcgactttgtaatgatttcttttttcacagtgatgtcagcaaaatcacacagacctaggggtccagcccggagctttgcaatgtccttctagttccctagaggccctctgctggctagcagcccttgggtgacagcttgctttcttttcacatctcttgcctctcaaatctgtttaagattctgcttcttaaactgtctgaattaggtgtctccgcagatttccctgtggccagctacctcccaaaccaaacacctatgtaagcccaccttggttgttgttcctgagcacgttgaggacatttgggcaaacacaacaagaacaggaagtcgacaacgttccagttataacctcctgctgctgcccttccagggtggggctgggcttcttccaacccactttaccacctgtctttgttcaggaaaggccagagtgtgccattgccttggaaatggcctgtgtaagaggctgagaaggggtttgaatgagtccaagaagcagcaggattggatctggaagggttgatgaggactgggtgaggtgttgtggggttgtgagtcttgtgtgggcgagagctggaaagcacagatggaggtggaaggacccttccttaccttttctctgctctctcttcctacctatttggttttttggttgtatttttgctttttaagagacagagtcttgctctgttacccaggctggagtgcagtggcatgatcgtagctcattgcaggctccaactcctggcttcaagccctcctcctgcttcagcctcccaagaagctgggaccacaggcatgcaccatgcatgccttgcttttttttttttttttttttttttaagagatggggtctcactatgttgctcagtctggtctcgaactcctgacttcaggagatcctcttgccttggcctctgaaagtgctgggattacagacatgagccactgctctagacccctgtctgtttttatagcttaaagtcacttttatacttcccatggctgtgttctgacagtttcatactgtgtataccttgatctgagctgtacacctcaagctgcttggttcgaatatatttcatctttctggattaaaaccctttgaacaaagagaacaggattcttgctcatctttatacaggcagcactaactgagcagtttatccaccagaactctcatcaccagggctcatgcacattcaggctgtatgctccaacactagatgttccccgtgaaacacccgagggtaacctggctgtattgtctgacttctttgaaaggtgctgtcctgtggaaggagtgagggtgtgggctttctttgcttgactgttttaccaagtttaattgtaggaagccattcctacaattgatgactttatgtaattatgtaattaaaatgaatcattgttgaagaggagactgagtgggagaaaaaggattgggagcatcttggcacatggaagcagctctggggaaactgagagtctcacacccctggctcatgtgccacctccagcttggatgttagaccacctgatcattttcctattgcgtctggcttattttgaacccctgcatgaaatctacattgaagaggagagaatactttttttcttttcacattatagttaattgctgaaagaaacagtttaggaaatctgaaaaaaataaatagtgacttaatctaaatggacctcaatttcctcactggcaaaaaggagtggatatttgaaggctaaataaatgatgcaaaaaaacaaaatacatgtgaacaaacacatgatgagcatagtgcccagaacacttcgggttttcaggaaatgttgttttccttatcatcagtaaattggaaggtaacagagcttgatgattatcaggtgctctgatctctaatagcccaggattttaaaaaaagtcctatttacttagaggaacaatttgttctcttagagaggcacaggtggagttgacctttgtatgcaggtcacattttggattaatgcattgctgtgcttttgtactagagtatttaatattcttattaaaatatcaggaggaaatgggaaatctcaatattataatctgcttgtgtgggttgatgtgttaattcagccctttggatgtaaagctgctctgggcacggcttatgtttggctggcacagtgctgaagtgttgagaccatcgtgctaatgagaccaaggtgcagggtctgactccctcggcaggctgcggggccctcagaggaccagtcacctcctgcaggtgtgtgttcttcatgtgagcaggtggtggggtgtccacaatatgtgaagtatcatgatcaacacaggttaatcacctgatttgagaaattctttgaagtttgaggtgggccattagtagtatcaaaaacagaaggaatattatgtgtgattaaagtcgtgaaaggagctattatttctgtgaaatttgtaggcttcatattttactctaacacattttagactgagttaaacacagagtagtttttaggtttaatttaaccattcaaaagaatggttagttttaggactgattgcctattaaattactgacgattaagggaaatcaaaagtttaatagctgaatgaaaattgagtttgcactatctaatttggtttagataatactttttcagatttcaggggaaaataaaggctgttttaatgtatgaatgcacatgaatgtttatttgattctgcagtgttagtttatttttccattaatgggagaatttgaaggtgtgttaagccaacctaagcaaatatctatcatttagaccactgctttttcctagtctatctcccctcttgaaaataactatttaaaaataggattttcagccgggcacggtggctcatgcctgtaatcccagccagcactttgggaggccgaggcaggcggatcatgaggtcaggagatggagaccatctggctaatacggtgaaaccctgtctctactaaaaataaaaaataaaaaaaattagctgggtgtgggggcaggcacctgtagtcccagctactcggggggctgaggcaggagaatggcatgaacctgggaggcagaggttgcagtgagccgagatcgcgccactgcactccagcctgggcaaccgagagagattccgtctcaaataataataataataataataaaagcaagattttcattgtctagtacttgttcattataattgttgcctgtttcacctgatccatatgctgtatacccatacatgtggacacacgtgctccggatatgagttgaaaattttgggcacccaatacggggcaggtgtcatgctcattgttaggatttaatggtcaatagggtgagacttgcagtgctggagagataaacaggtgctcatactatgaatggtgcatatttgtgaggaaaacatcagtatcaaggcagcaaatacagcagcaatatttgtgtgcctgcttggattttcagatagtggattctcactaatagaatttgatatttcacctttaaaatttctcatcatagaaataaatcagtaagctctgccttataaagggactcgagtccttccatgatcacccattctacagaatgcttgtttacatatgcacatctatttctggttatcattaattctccaatgatgctgcagattcagtctctcagacatggagtctacctttgtcttgttactgatgatgtgcttaacaggtaagctgatctttttggtcatagaattggccaatgtggataatcctgttaataccctacctcggccaagctcagaggatgatattagatagcatgaatctagtctgaaaagtttttctaacaccctgcagatgtgttcaagtcaaaattgaaggtaggggtttaaataatattaggaagagctaacatttgttgagaacatactatgtccccgatgccgttataaacattttatttctgttaactcaatgtttgacttccattttgcagatgatgaaagtgaggcatggactgattaaataacaagcctggggctcatggcagacccaggagtgcagtggcagagctcatgcttttagccactgtgcttcatcttcggtggcaggatactgagtcctgtacccagagactgtttatatacagagtagtgctaacgtgttgttctaatcagtacataggaggaaatggacacttcggttaaggaaagtaaaactgagattccttatatttgacaataaaatagaatctccatgtggcaggggataactgcccccaagatccattctctatcctgcgccaattgttgccctatattctggcctaattacctgttagtactccctcaggccaactatgggcccagaccctagtgtatagtaaccctcactaaattgagtgcagcatttaaggaagacttggcaaaggtgaatgtgttactcacagaaacaaacctagagggagatgagtcttgagtgtgacttgcaggtagagctatatataagaccctacttcacaaataatgcctagttctgaatctgtatccggtggaatgtttcagaacatgagatttggagccagacgcacttggccctgataacacagacaccttggtgaaccacgtgttgtcatgtttggggggttgaatcttggtttagctattgcctagctatgtgagcctgggccagtcaacaccttcttcgagagcgtttccacctctgtaagttggtgctcatctagcagatttgtttaaaggtcaattgcctgacatatattaattaccaggttggatgccaataatttcttgttggggacatcatattctattcattcaggaatggtgtggctattatctcaaactctgccaaacacacgtactggttctcctctccagtgtactattttatttaatatttgtggagtacttacctgagctggttcagttaggaaaacagacagtaaacacaagaactagataacttcagattataataagggctgttaaaataaacaggagacataaggaaaagttgggatagggtaggggaagaccaacgggcaactcactgtggaagtgatgattgtgttaaggtgtgagaaacgggaggtagagcagggtgggaggaagataccaggcagagaagacagcaagggcagaggacagctatgctaccctctagtcctagggtagcacagctgaaactccccaaacatgacaaccccatggttcagcaaggcgtgtgtgtcatgggggaagagtagattatttcctcataaatctttcattttatagttatcaaagtgccctccataaatgtattgcctgctcccttcttatcttgaagtatgatacagatcactaagattcctgtttccctggacttggaaggaaggcacaatagggtgagcgaggtgccacacaagttattagaaactgctggggagagagggctcttgtttgccctagagaattcaagggaactcaattatgttattgtagagcttttctgaaggtgtaattgaaatattcaggtgtaacatcataggatatgcaggtaagatttgtctcattaaaataacacctttaaacttactaaaggttttaaatgtcttagtcaattaaaacaatgcattagtgttacagtgcagacagggattatctccataatattgtgtggagtgctcatacagtgttagagaaatgaactaaagtgaaatgaaattaaagcagaatataaagaccatgagagtaataacagtggtaacttgaggcccaatatataattttttttttgagacagggtctcactctgttgcccagtctggagtgcagtggtgcgatcttggcttaccccaacctccacggctcaggtgatcctcccacctcagcctcctgagtagctgggaccacaggcatgcatcaccacactcgactaattttttttgtcctttttgtagaggtggggttttgccacattgcaccagctgttctcctggactcaagtgatccacctgccctagcctctcaaagtgctgggattacaggcgtgagccacctggcaccaatatatataattttaagttaaaacttttttgtgtatttttacatttttgaggcatgtaaatatattacctgtgcatttttttatttgtacgccttatgtattttttcacttttgaaaaactaaacttgaatgcctatcttcttcaacccatgtttgtatttctttgacatacttgactcctactcgatgatgtgatactattttagaagtatggttgggcagaaagggggaggcatgaaagagatgcagaagtcatgtgtttaaaaatgtacctgggattcgttttaatcgagtatggtaagacctgcagacacagaaaggagcatcatcaagaagtttgtactcacagttccctagaaacaggaggctggcacaccacccagggccacacatagaagctccaggtggcttaggaagcgtggacagtggccttccctctggtttccatgagaagggcaaggcgggatgagcaggtttagaattggctgatatggataatttcagtgagctctggacataagggctgctctggttgtctggcatctggctctggaatgatcagggcaggcttgatgagtgagagtttcctaagggaggcagctgggaggcacagcacagactggattgtttggtttgcatgtgaaagacatattccctggcaagttgtttgctatttctaggaattagccctagaaggggcaatcccctcccagggtcagtgaagccccaggggccagagcgttagggtacagaaaataagaaaacatagttattacactataatatgttatgggaagtcttctgttatttataatcaaatggagacaagacacacatccatggttaacttgtaatggaaggtagcataaagctcaatgctgaagggcgaggtaattttcccagacttcagggaagggagcgtttgtcctctgggactctgaggagatgtcttagtggatggtagaacagtccagattttccagaaaggagtaggactagaagaaaggagggtgagttcaggacacagaaagacatgcgtgtctgaagcagaggtttgcactggagggggagcaaccattggaaagacatgcgtggaagcaaatgttgaaccctttaattacaggctggggagctcaagaaaggcattgtgaatttattaacaatgcaagttcagatcccataccgtggcttcacttcctaactctgttagttagaaagcaaccctctgaagtaatgtcaagtgcctcaaaaataaattctcaaatgctggctatgatttggatcacggggtgtttttaaacatgctgtgtggcatgtcagacagcagtcatgtgtcattgtggatagattcaggcaattaggaggtgtgatgtggtgaggatttccaataagccatgatggcactggcaatgaaaaaggagaaataaacgggagctatttggctacatagtttaattcagataaatcctcattgagcctcattataacctcatcatcatgtcattgggaaaatgaatttactgtcaagtattgaagcttagaatgctgccagtgggcgtgtgttcgtttttctgtggagggtgtcccttattgtcatctaattcccacaggggactagaacccaatgaaagtgattcagaatctggggtagggcagacaggaatgtgaaacatgcctctgtcacttgctttttgggtgatacagggcaagttaactttttaagctgctaatagtaagctacaaatagtaactgctatgataatattcagaagaacagtggtagcgggtggatcctctacctagaacactgacgaattcactcctacttgtcctttggactcagatgtgactgtgtgtgcgtgtcgtatcacctgcttgttatggctgttgtacttggcactgcacgatgtcatggcctgtgtgccatgctctagactcacacacctggaggctggcattgtgtgggttctggtttctagtacaatcgtgtgtaggtatagtgggtgtttcatggatgttgttttgctatgcattttaagaggcattgtcaaacctgagtggtggttttgtttattagcttgagaagagaccagttggggaagacttgaccaaacttttgggcattgagagctgtccagccgagagtgctgtcatggaggtgtccaagcgggggcagaatgtccaggactaggcgggtgggatcagtgtgctgcctgggtggaaacgcctctctgatattgggtctagaagagacacgagctgccacctggcttcactcctcacccctcactgtatagttcaaacagggacttacgcaaagttgtgtgatgagttggtgactgctggttgccctgtgcagcatcgagaccgagtccaaggctccttctgtggaaatgggtactggttgagaagaaatcaatgacatacgcaaacagagtagcctattagagagccgaatgaaaagggaagtaaccctactgtttgtgaggttggaaagggtggtcggcatgctgacaagtaatgacaccatgaagcagcgttcatacagaactttccagctgcaggagttgtgctgagatgggaatttgcgttctaggtgagacgcttggcactggtgctacccttgggcatttggaggatccaaatccacaagaactcagcctccatttgcacatggggccaggacaagacctcatgtgctcagtagaaagaaataactccctcttggaaggagtaagatgttggaaaaataattaaacactctgtatattttctcttgtggatctttcagagtttgattaggtgccataactctgatgctgaaaaggatagtcatacagtcaattgtgaagaaaattaaggtcctcgggttaaaaaaacaagccacaggataaagcctgaatccttaatggcaagtttggtgtggcatgtgactctgagcctgttgccggcatttggtaggtagaggcataaagatgtgtgtgcgcacacactgggtgcaagatagcagctcagagccaaacaaggtatgtagatctttaaaaaaaacttctccagtaggatttggagattgtcctttgctaatggttatccaaatgtttacaagcactgtgaagtaacattctatgtctgaactcctcgagctgcaagaggtgattctgtcatgcgcatgggtatgcaatgcactggagagcatgttggaaggaatccagtggtggattgcagtccacttccctctgcctcactccagtggaaagttgctcattggtatttttgtgctccactaccctgctacctcagtccagttttgcattgaataccgtcagtattcagtattgtctatataaatggtatgaggattagatattatattgatagaattatttgtggattggtaattggtataagattttgaagagatagaactgattggtatcctattattttaaaatcctttttcatctaacatctatttcgtatgtttttttcagaagttgtggttagaagattatttattgagaataatttttaaaaatctttcctttcctttttttttttttttttttttaaaaagtatacagtgcggccgggcgcggtggctcacgcctgtaatcccagcactttgggaggccgaggcgggtggatcatgaggtcaggagatcgagaccatcctggctaacaaggtgaaaccccgtctctactaaaaatacaaaaaattagccgggcgtggtggcgggcgcctgtagtcccagctactcgggaggctgaggcaggagaatggcgtgaacccgggaagcggagcttgcagtgagccgagattgcgccactgcagtccgcagtccggcctgggcgacagagcgagactccgtctcaaaaaaaaaaaaaaaaaaaaagtatacagtgctcagacagagtcactttatagtgtgatgggaaaggtcacatgtaataatctatggtcctcttgctagtaagtgcatgcccctaaaccaggctattgttctcattacttctaaatctttgcttgggtcagtgggcttgaggccatcggacgctattaacttcggtttgtattctcagaattgtatttttttagtgagaatttacagttattgtttagttgttggggaaattactgctcttacccatcttcctctttcttatgtgagatatcttgatagcaatcactttaccaaaaatagtgtatgtgttggttttagaattattggattgaatgggtctgaaattgctttgactccagtctcaagtttgctgatgataaaacttctattagatttgttaagtaggatttgttttttcggcggggcgggggggggtggtggtcacaactcattggaaatgcctgttaatcagtctctctctctctctcaagagatctattgacatatacccttcattcttccagtttcttttctcaaaaccacataaacccccttgatttatttttccttttataagaccattattttctttcttgcttttcatataaccttaatgtctgatattagttttaaagtctgattagtaaaatcattttgtgttttacaactgttatacgtgttaaagtcaccttcacacgtataatttaacctcatagacttcttaaaacacaacctgatataagtgccttcactttttatcacatcctcagccctttatattttttgttctcagtgtatctgacctagagactctatctctctagagatattatagttccaaatctgtatccagaaagacgtacacatccctgtttcgctccgcaggtctggacattaccaggagagcctgctcacttatttccctttcaaaactgttgccaactggctagcatgttgatggctctacataacttattattattatatacaatatatgctatatcatattctatgataatatcaaatatcattaacaaggtattattaatatccgacatattcttgccttcctttatattctcctatacaggcattctttcttgctctagaattataaattaactgcaacttcacaagacccgcgatagagaaaggaaaatgatggcctccactgcagagtgtagagctagaggtgtggaaaggtcaagcagcttctccaagctgacgctgggattacaaaccagctttctgtgttcccgaccaggctttggttattctgaggaaattggatctaacaagtgtttggttacagcttcctataaaggacagttacgtttagctttgttgaaaatccaattttatatttctcctagataataccgaatgatgagagagctcttccgctctccctgctgaaagttgttgattttctaattgagcagggctcatttgaggggagctgacagatttttagctcctgattctaggtcatttctatggatgctataatgggtacatgctttttttgtcatgcctcagacacaaaccattaatatttctgctctttcctatttatgcaaggtatagaatagtcccagtttgactcccttacaaaggtggattggggccaaatgtaccatctggctggcctccaatatggaaaccaggaggccacgtcttggacatttgcgtatttcagaaaaagtcatcaaggcagatattgcccaccagttttgttccagatgtacccatttggaaacccttgaaaccagaaacattcatgagatagagttctggccaatgagacgggagctgagggcatctgaggaagccccacttcccggatcgaggtgcccagttctctgtttctcctcgtgtggaacacggctgtggatctgaagaggagcagcatctgtgacactgtgacactataatcccaaagggctgggattataggtgtgagccaccatgcctggcctgaaggttattttatacaatattttaaataattttgtacatgaaacaaagtttgtgtacattgaaccatcagaaagcagaggtgtcatgtcagtgctcaaaaaggtttggattttagagcatttcaaatttcagattttcggattagggatatttaacctgtgtgtgtatatatacagtacagtacatatatatatatatatatatatcttattttacatataaaacttataaataagaaactaaatatgtgtgtgtatatctgtatatctgtgtatctctatataaattttggtaaggaataatactgtgtagagggagatattaccttaccaagagtcagaacatgtataaaactactgtaaatcagttggttgggaattgacatagaactaaatacatgccaatatattgaagagtgatatctcagtaaagtggggtgggtaattgtgctggtaccattctttgtgtgtgtgtgtgtgtgtgtgtgtgtgtgtgtgtgtgtgtgtgtattttgttgttgttgttttgagaaagagttttgttctgtcacccaggctggagtgtagtggtgcgatcttggctcactgcagtctccgcctcccaggttctagcaattctcctgctccagcctcctgggtagctgggattacaggcatgtgccaccatgcctggctaatttttgtatttttagtagagagagggtttcaccatgttggccaggctggtcacgaactcctgacctcaggtgatcctccctccttggcgtgccaaagtgctaggattacaggtgtcagccactgtgcctggctgtgctggtaccatttttaaataagtggctatgtgtcaggatgaagacagaactgaactctatcctttatcatatgtgaaaataaattctgattgcagaaattaaagactgacataaaaaagtcagtaaagacaatcttagccattacatatataatgaggttggggaagaacttcttaatactaaaccaaggtgctataaatattttggaacatttccaatgtccagtacctctttgtatgtcaaaggtgccattaaaaacttgatatacaaatgagtagtctagaaaactactaaatgtaaactacataatataaaatagagttaacagacaattccaagaggctttgcaaagggacgctggaaagatcaacaaaccagtgggaaaatgggcaaagtatatgaggagatgatatggctcacaaatgtatgaaaatatatttaacttgattagcagtcaaggaaatgcaaattaatgtgacagtgatgtcttacttgacataagacagtactgtaaaaaaaaactgttaatatctgttgctggcaggaatatgcatgcaaataatacaccaacacattgctggtaggaatgtgaagtttgaaaatccttttagcatgttgtctactatatattaaaatttatgctcctctaggaacagaaacaagacattaggtaggaacttaggaaatctgaatgcagtgcggactttagtttaatttttaacaaccacatgaccctcagactcattaattccacttcaggcaatcgatctcctagaattaaactcaccagtattcatggacatatgaacatgggtctttattgtgacgtgtctcataacatacaaagcctggaaataaagtaaatgctcatcatagaagaatggctgaataaattatggaaaattatatcaccattaaaaaggatgaattagaattatacaattgacttgcaaggattttgcaatattattgagaaagaaaaaaattcagaaaatggcataatgtctcatacttgtggaactttggcaaccctctgattatgtgtgaatacgtgtgttgagacatctatgtaagattgtataaacttggagaaaagatggaaacgtatataggttgttattaaaataaccatgtgtaaatcacttacatatttgtattagatgatgcatatatccacagaagcagattttctgggagctaatggtatttacgcttcagaatgtctgccccagggccccaggggggaccttaccaatgtagacatggccaattatttttgcataatttaatagacttgagccttgcttggggtaagaacacagtgtcttttcacccaaacttcccccttctcatccttcttctgttaggagacatgttttggggacctgggtaagggaaagttgagttagaaataacatttcgttgggtttagagttgtatttacatggtgtgcagtcacttttgtgaacaggtaaatttttagctctcccagcatagaaataaggaccagaaatattcttcctggccacctctgcatctgaggttatgatatggtgtagcatttctagaagtatcaaaatatcagtgtggtatattatgcttgaagtatgtgagtcatattggagagacagtgtttgaaatgtgtggagccagaagctagattttaagtttcacttacaaaggaaatttcatggcaatccctctaaatttgacaaccatcataaaaatttacatgacatatattgataagttgtggagctgaaagaagctttaccaaaagatcaattaaaaataattgatcaattattgctagaggaaaaatgaattatctgttctttctatacaaactatttacaaaattttctaagaaactacccacacaaataaaattaaaaatatggaggggaaagtattatggactattaatattaatattatagtatttaataaaaatagtatgttttctggataacgtgatgtatttttcagccttcatgaatgtgtaatatgttgtgtttttttcattataagtaaacttcacttctgtgcccaattttgttttcgtaatactgtatttttcttaaagcaagattcccaaattgtatacatgttgtatacaaattgcatccagtctccacaaaatttaatattctccttctgtgatttctgggtaaactaatgagtaaattaaatgaaaagatgactaaacattttagaattacttaggaatgaataccagtacattgtgtttttattttaaatggatataagtgaatatgcaagaaccaaatgcaataaggctattacagttcttccttaaacatcagttctctgaggattattattagataatttatgaagaacttgaacttcatctggcgcacgccccaaatgtttactttgcagaaaacactgctatgctggctggccagtagagggcactgtgctgttggtctgagttgtacaatgagcgttcaacctgcaaggcgtggacaggtggttaagataataaatattttatgtgaccagcctagagctcacagtacaagacaagaaatttctttctctctctgactccctgcctttgtctgttcccgtctgtctgtaacacacacacacacacacacacacacacacacacacacacacacacagagaatgttgaaataaatggatggattacagattgtacactttgggtagacatgaatagagaaaatcttgttagagaagatgaccccttgggctattggctcagaaaaggagaaggatgtggtttgatgaaaagaagaaagaaagatgttctaggaatttggcagaggatgaaaggaagcaagagaacttaataagagcaaatacgttttagaataaagtgatttccatttaaaggggaagaactggactcttcgatttccctgtggggtgagttttagggtaaagactcctgtgctgaaagccagcctgctcatctcaaaggaatacatacaaatgttgcactctgagtgctgtactcatgtttgtttcttgttagactcttatggggcagatgacagtttccccttcttttatccatgatctaggtgtcaattgccgctggcaaaaggaagtgatagtggggagtgatatcagatatgagtagttactagctcttttgtggtggaagcagtatagaaacaaactgggtctttagtctgatttcatgttctaaaaaaaagctccttatgtatgaccagtcctaaacttagctaaaataatcagctgtcccttgacagttatatctggatactacttttttatattaaagtattattaaaacaacacatgtaggtagctaaaagttgaaagagtttagaagtgcttatcatgaaaatcaataatctcctgccctctctcccatcccagtcctgttccaccaaaggcaaccactttgaactctttgtgtttttaattctttggaggtttctaccatatttcaaaattaagtttagaaatgtggttttctctacattgtgaaatacagtttagaaatgatctctctgaactctcttatagatgcagatttcagttaattacctcaggtccaagtagtgaggcagtgtatcatgtttgcctcttttctagtataacttgcttttcctgccttgttcttctccttaaacaattttttttgcattttaatttttatcttttccatcagatcaatacacatttatattataacctctctatatattttaaaataaatatcccagaataatctcttggttttaccccttcccctccacacctcgccatcttcttgccagataaactggctgccctgtagatgtgttgctgtaaagtggtcatcccagaactttctcactgctttcttgagttgtattccctgatatttagacactgtcagggagtggggtggggggttgctttcttgattactgttttgtattgttgaagaacatcttgcagtaagaggcttcctagaaaagcttatgtgaaaagtagatgtgagtgtctgatagcttggctgggtatagaaatctaaagtgtcagtttagaggtctgtgttgctattaagaggctcaatttcatcttcattttttttcttcttataaataggctctttttaatatctttatggtttagaaatagcattctataatgaaaaatatttagtattctataatgaaaaattttggtatgtgtctcattgttgtgggtacttcgtgtaccctttcaatcagaaatctttgttcttagagttctagcaacttcttctgtataacttgttaatattatctttctctggtttctgtggaactcttttttttttttttattgatcattcttgggtgtttctcgcagagggggatttggcagggtcataggacaatagtggagggaaggtcagcagataaacaagtgaacaaaggtctctagttttcctaggcagaggaccctgcggccttccgcagtgtttgtgtccctgggtacttgagattagggagtggtgatgactcttaaggagcatgctgccttcaagcatctgtttaacaaagcacatcttgcaccgcccttaatccatttaaccctgagtggacacagcacatgtttcagagagcacagggttgggggtaaggtcacagaacaacaggatcccaaggcagaataatttttcttagtacagaacaaaaagtctcccatgtctacctctttctacacagacacggcaaccatccgatttctcaatcttttccccacctttcccccctttctattccacaaaaccgccattgtcatcatggcctgttctcaatgagctgttgggtacacctcccagacggggtggtggccgggcagaggggctcctcacttcccagtgggggcggccaggcagaggcacccctcatctcccggacggggcggctggctgggcggggggctgacctccccacctccctcccggacggggcggctggccgggcagaggggctcctcacttcccagtaggggcggctgggcagaggcgcccctcacctcccggacggggaggctggctgggcggggggctgaccccccacctccctcccggacggggtggctggccgggcggggggctgaccccccaacctccctcccggacggggcagctggccgggcggggggctgaccccccccacctccctcccggatggggcggctggccaggcagggggctgacccccccatctccctcccgtacggggcggctggccgggcagaggggctcctcactttccagtaggggcggccaggcagaggcgcccctcacctcccggacggggtggctggccaggcggggggctgacccccccacctccctcccggatggggcggctggccgggtggggggctgacccccccacctccctcccggacggggtggctggccgggcggggggctgaccccccccacctccctcccggacggggcggctggcctggcgggggctgacccccacctccctcccggacggggtggctgccaggcggagacgctcctcacttcccagacggggtggctgccgggcggaggggctcctcacctctcagatggggcggctgccgggcggagaggctcctcacttctcagacggtgcggttgccaggtggagggtctcctcacttctcagacggggcggctgggcagagacgctcctcacctcccagacggggtcgcggccgggtaggggtgctcctcacatcccagacggggcggtggggcagaggcgctccccacatctcagacgatgggcggccgggcagagacgcttctcacttcctagatgggatggcggccgggaagaggcgctcctcacttcctagatgtgatggcggccgggaagaggcgctcctcacttctcagactgggcagccaggcagaggggctcctcacgtcccagaagatgggcggccaggagagacgctcctcacttcccagacggggtggcggccgggcagaggctgcaatctcggcactttgggaggccaaggcaggcggctgggaggtggaggttgtagcgagccgagatcacgccactgcactccagcctgggcaccattgagcactgagtgaaccagactccgtctgcaatcccggcacctcgggaggccgaggctggcggatcactcgcggttaggagctggagaccagcccgggcaacacagcgaaaccccgtctccaccaaaaaaatacaaaaaccagtcaggcgtggcggcgcgcgcctgcaatcgcaggcacttggcaggctgaggcaggacaatcagtcaaggaggttgcagtgagccgagatgggagcagtaaagtccagctttggctcggcatcagagggagaccgtggaaagagagggagagggagaccatggggagtgggagagggggagggggagggggagggagagggagagggagagggagagggactcttaatagttggatattggtcttgtatttgtactattaagtctcttttattttgcatcttgtttttttggttttactttttggaaaatttgcttagctttatttttcacttccttttttgcaatattttagttaggctagcgtacttccaattgccaatagccattttattctgtttcctttttagaaataccatcttattcttgtttcatgtgaatgtgttatcatcttatgactctgaggatattagaattagcattactccaaactctaaaatattcttttaaagtttgctgtactgtttcctcaggtctcccctttcttctgtattcatttaaaatctcttttttgtggtgcaggctttctacacatatttggtaatttttcaaagaggaagtgtagcaggatgatggggtgctctgtgagtgcaggccagatagcaagactcacttttcggtgaaggacttttagacatgagtgtatgaggtttgtgtgggtgccctgggaatactcctggctgtgggtgtagcagcctggctgtgtaagattttggtgtaaccagaagaagggggcttgtgagagaggaaccatgtttcttttatgaagtcttttgcttcgaactctttatagtttatcttgtggggttcctccagattcctagccctgatttcctgtgtgagctcctctgtgtatggacttcaaatacctccctttgctttctatgcttgccacagacccttttccatcattgatgtctcatgagtctcctgagctctgcaggctgaaactgttcccctcctgtccacaggctcccctgtctccaatgcactgggcttgtgcctgcctctgccctgcctaatatatgattgtgatagtaaagttaatgtgtcaactcgacagggctatggggtgcccaggcatccagttgaacattattctgagtgtctgcgaggggatttctggatgaggttagcatctgtatcagtagagtgaggaaagcaggtggactccctagtgtgggcggccccatcaaacagttgaagccctgaccagaacaaccctctgccaagtaagagggagctcctcctgcccgacaatcttcaaactggcacattagcttttcccgccttcagagctactgaaacaatggttattcctgagtttccaacccaccggcctttggactggaaccataccattggccctcttgcccattcccactgctggtgttggagtttgccagactccatagttgtgtgagccaattccttatcataaatctctatatgtcacctagtggctctgtttctttgacacaatgacactcttattacaactgcattattattttaaaaatggattgacatatcttctgagataccatttgtgaagctagagcccgttcttcctgcctcgcaggccagggcccttgcttaggcggcagcccctcttgtgggcttctctctccctgcagctcatactcagaaggcgtcttggaggcatgttcaacttgtctggcgaaagcagaaagaagtctattttagaaaaaagacaaccccacatcttagctaatgattccattcctagttgtgtgtgtgtgttttaaactgactgcatatttttacattcctttctagtatggtagtggtgtccctgtaggcagaagtggtaaatgtgtttccattttacaattgtcagtctgaagctaggcagcctttagatcgggtctttactgctgttagaatcctgcacataacagacctatttaactcatgtctctatgttggatttcagttagacacctgcagggatgggtccactttatgaaactgtgagctgtacactttggttttgtgcactttgctatatatgcacactttggttttgtgcactttgctatatacgcatgataaacaaagaaatgtcagttagaattaaacacttgaataaagtttgacaattatgtgagaaatccagaaagatagaataatatagcttgccccagatttttaactctacaacatgagggacggatagatatggctttctacccagacctaaattaaacatttgtgttttccatactagaaatctctgtgtaccaatcatctcagctcccgatgttctcccagcttgaccacttcggtttagctttccatccagatcttatttgatgttgtagttcctgaaccctgtctccttgggaagtgtcttttctgacaaggtatgtcctccccgagaaccagtgcacccttgactgagggcaaaagcgtttgggacctgaaaaggatgggtttaggcccttgcctttggataactcgatctcagagtggctgctgctccttacttggtttgtagcatgccaacacttaggacagccttaaatctttccttgtagtagggattatttccctctgtttggaaagaatatactgaattctgaatgaaaggccaaatgtggtatacttaaatgcaatatgttttagtgttagagtttcacacgctgacctgttgcgtttcttttggggcagtggctgcatggggcctgaattgtaatgattcctgtacttgttgaggccagatatttttataacaaataattgttgtttcttttaattgaaaattgagaagaatctcattaaaaatgatccttctcttgcagtgcaaaattaaataaatctcataactcttttttttttgtttttataccatgaagttcacattttttctttctttcttcctttctttcttactttttttttttttttgagacggagtttcactctctcacccaggctggagtgcagtggagcaatctcagctcactgcaacctccgctttctgggttcaagcgattctcctgcctcagccttccaggtagctgggattacaggtgcctgccaccaagctcggctaatttttgtatttttaatagagacagggtttcaccatgtgggtcaggctggcctcgaactcctgacctcaagctatccacccacctcgccctcccaaagtgctgggattacaggcatgagccaccgtgcctggtcacatttttttttttttttttaatataaagcacctggtcatgctcactttggcagcacatagactacaattgcaatgatacagagaaggttaggatgatccctgcgcaaggatgacacacacattcatgaagtgttctatgtttttaaagttaaaaaaaaaagaaagaataaatcacttgggtaaaacctgcttttcaataatgtcacttttaatgatattagccataaatatctgatatcttgcatttggaattggttatctaagagttgttttcactagaagatcttcctggcagcatgctcagtggtcaaaatgttatcttcttctcagctcatgtttccatgcaggtgttgagataaagtgtttcatgtccatagttatttgttgaataatgcattgagtaatagaacagatttggaaatctgataggagcaggacagtcacactatttaataggaattataggtagactctaatttatgaacttaccttcaaaggtgtattgtaaattgattggtcagcagtcgacttccatttcactccttggatgtgttttgtgacagatagtctaaaagagcactaatacctctcctggtccaattactgcattctgggaacaggctatgagataaagcagtatctgacacccctttttcctgctgtagactaagaattaggaacatgttgaaaatataaatggcagtgttttaaaatgaacttagtgaccttttatttgtaactggtgagatttcagtagtttagcattaataaaatgaagtgaaaatttcttgtaaggtgctcatatgttaccattgacaggctctatttatcagtgggaattcttggatttaagattatttccagaatacaatttgggagggatggtggcaaagcctaaggaattgatgccagatgtggaaggccatgggctttgccatccattggaatgtcctctggggtggctcccaggtatgcagtgatgtccatcaagagaagtggcagagggccactgggaagggcttttgcatttggtggtgttgctcttgttctttcccttgattggttgaatgcactgctaaggaatcattgaattaaactgcttaatgtttagtgttatcatcttgtcctcaacttccaatcatctagaactccttgctgagtgaccatttgggaggaggaaggtgaatgatatcctatcgggagcctgctaggatggaaggcttccaggacatgggcatggaatgctggccctgttcacaaagtcagcttccggtggggacgcttaaagcctcctttattctttcagtaaatattgaacgcttactgtatgttgggaagatataagaaatttgttttgccatggaatgcagtagaataaggcaattgtttttgactgtctttacaccttaacatggatttactgtttccattttggtgttgcgtgttaaggtttagcttaatttctgtttctggaggcttgcttgaaggggaagttacactttgagcagctactgaactttgcgtcttttaaatcggtctctggagaacagctgtcaacttcaatttttctcgtagctggaaaatcagactctggtattgtctgtgggttcttgctttctgctgcatttctggaggtcagactcctgtggtgccttgtgatttgtgaggatcaggtagacccagacccatattttgccagaccctattttctaatggattgtttctgtatgtgcctaattatgagttatggagtgaagcgtgtccaacatacatgtaacaagatccaccccatgagttgggctcctcagaggagggtttgcagatagatattattgtcaggttttgtcctctcctgggaagcctccagatcttcccatctcccaaaaggaaaaaggccagtgtgtcaacatgagtgacaaggccaatgcgttggccctttgccacgttcatttcagttctcttcatacttctccacctccgtttgcccaaattgggctctttactctccctcctacaggtggagcaacgggagctctcccaccttggcgtttctgcactcgctgtcccctccctctgcaaagctcttcccctgtgcgtccatgagacttgctcctgctccttcacctccttcagggcctagttcacaggtcaccttctcagtgaaaccttccctcgccactctgttgaaaataatcctcctcccagccccagccagtgtacccttctgtatcctccttccctgatctgttttcccctgcagtattcatcacgatctatgctgttatgtgttctattttttttttaatctcgtttctcctctagagtgcaatttccttgagggtgtgcgtttttgaccacttggttccctttagtatctccgggggctggcacactgccctagtacataattagggctcaggaaatatctattgcacatgatggatggatggatggatttttgataaatcccggtcatcttcatgtcacccagtttcaggaaacactggcctcatgtttagagggagactgagtgaatcatagagaaatattcctgtttgcgcctggtcacttatctccagcccccaagctctaaggtcttgggtttccatgcagctaaagcccctccttgctgtgactagccaggaggacagtgatgctggcacatgcatttcgtcacacgagtgggaatgtctttaggggaggggtggcttatttacttgggtgaataaactatcctgttgggaagttctgtcattcacccatttacccctggagatgtttttcccctggcagagtgaatggtaaaacatctcccatcttattacatttttaaaaagttgctacataatagttgtattaacacatattttaaaggtacatgtaataatttgatacattcatatagtgtgtaaagatcaaatcaaggtaattgggatatccaatgccttaaatctcttctagatattttgacgtgtacaacagattattgtaaactatagtcaccctgctgatctttcaaataccagctcttattttctctacctaactgtgtatttgtacccattaatcaacctctcttcatctcttcctccgtgctacccctcctagcctctggtaaccaccagtctgccctctgtcttcatgagatccacttttctggctctcacatatgagtgagaacatgtgatatttgtctttttatgcctggcttatttcacttaatataatgacctccagttcaatttatgttgctgcaaatgacaggatctcattcattttttgtggctgaataagtactccattgtgtatatatgccacattttctttatccattcattcactgatggccacttaggttgattctatattttggctactgtaaatatgctgaatagtgctgcaataaatatgacagtgcagacagatatctctttgacatattgattttctttcttttggctctatagccagaagtgaaattgctggattatatggcattcctatttttagttttttttttttttgttttttttttttgagatggagtcttgctctgtctcccaggctggagtgcagtggcacgatcttggctcattgcaagctccgcttctcaggttccacaccattctcctgcctcaacctcccaagtagctgggactacaggtgcccgccaccacacctggctaattttttgtatatatatatattttttttagtagagacaaggtttcaccatgttagccaggatggtctcgatttcctgacctcgtggtctgcccgccttggcctcccaaagtgttgggattacaggcatgagccaccgtgccggccctatttttaattttttgaggaacctccatgctgttttctatactggctgtaccaatttactttcccaccatcagtgtacaagggttctgctttttgcatatccttgccagcattcaatcttccctgtcttttttataatagccatttacactgcagtgagatgatatctcattatggttttgatttgcatttttctgagaattagttacgttgagcattttcctgttggccatttgtatgtctcttctgtgaaatgtctattcagatcttttatgcatttttaaaacatattattttatctatttatttattttagctgttgagttgtttgagctccttattatattctggttatattctccttacatatcccttgtcagatggatagcttgtaagtattttctcccattctctgggttgtctctttgttgatgttttcttcattctgcaggaggtttttagcttgatgtaaccttatttgtctatttttgctttggttgcctatgcttttgaggtcttatacaagaaaatctttgtctagaccaatgtcctggagtatttccccaatgttttattttagtaattctcagtttcaggtcttagatttgagcctttaatctatttttatttgatttttgtataatgagagataggggtctagatttcttttttgatatgtaattaccagttttcccggcatcatttattgaagaaactgtcctttccccactgtatgttcttagcgcctttgttaaaatgaattgactataaatgcatggctttatatctgggttctctctatttctctttttttaagagatggggtctcacaatgttgctgatctcaaactccaggcttcaagtggtgctcccaccttggcctcccaatggcttctctattctgttccattggtctatgtgtctgtttttatgccagtaccatgctgatttggttactacagctttgtagtatgttttgaagtcaggtagtgtaatgcctccagctttgttctttttgctctggattgctttggctattcaagatttgtggttccatataaacgttagaattgtgtttttctgtttctgtgaagaatatcattggtatttttatagggattatattgaatctgtcatttgctttgggtagtgttgtcacttgaataatattaattctaatccatgagcatggaatatctttccattctttggtgtcctcttcaatttatttcatcagtgtattaatagtttttcttatatagatctttcacttctctggtgaaattgattcctaggtattttacgttctttgtagctattgtaaatgagattgttttcttgatttcttttttcagattgtttgctgttggcatatagaaatgctactgatttttgtatgttgattttgtatcctgcaacttacaatcatgtcctttgtgaacaaggctaatttgactttttcctttccagttcggatgccctttatttatttctcttgcctaatttctctgtccaggacttccaatactatgtttaataacagtggtgaaagtgggcatccttatcatgttccagatcttagaggaaaggctttcaatttttcccagttgagtatgatgttgattgtgggtttctcatgtatggccattattattttgaagtatgttccttctatatctagtttgttgaggatctttatcataaagagatactgaattttgtcaaatacttttttcagcatctactaaaatgatcacatggtttttgttcttggttctgttaatgtcatatatcacatttatagatttgtatatgttgaaccatccttacatccctgagaagaattccacttgatcatggtgaatgatgtttttaatatgttggtgaattcattttgctagtatttggttaagaatttttgcatctactggacgggcatggtggctcatgcctgtaatcccagcactttgggaggccaagttgggtgaatcacttgagatcaggagttcaagaccagcttggccaacatggtgaaaccccatctctactaaaaatacaaagagatagccaggggtagtggcacatgcctgtaatcctagttactctggaggctgaggctaccttgaacccaggaggcacaggttgtggtgagctgagatcacactactgccgtccagcctgggcaacagggctagactctgtctcaaaaaaaaaaaaaaaagaattttttcatctatgttcatcagtgatattggcctataattttcttgcctggttttattatcagggtaatgctggcctcagaatgagtttggaagtattccgtgatcttcaattttttttcaaggctttaggataactttttttttttttttttgagtcagagtttcactctcattgcccaggctggagtgcagtgccgcaatcttggctcactgcaaccttgacttctggggcttagatcctcccacctcagcgacgtcctgagtagctaagacttcaggcacacaccaccttgcctggctaggtattagttcttctttaaatgtttcatagaaatcagcagtgaaaccatctggtcctggactcttctttaatgggaggcttcttattatggctttgatttagttacttgttattgattggttgaggttttctgtctctttatggttcagtcttggtaggttttatgtgcctgagaatttattcatttcttcttggtttctgatttgttggtgcataattgttcatagtagtctctaatgattttttttgtgtgtgtatttctgtggtctcagtttttatgttgcatttccatttctggttttatttgagtcttcccttttcttcctagtctagctaagggtttgtcaattttgcttatcttttcaaaaattcaagtttttgtttcattgatcttttgtactttttttagtctcaattttatttctgctcttacctttattatttcttttcttctactaattttgggtttcatttgttcttgtttttctaatctcttaaggtactttattaagttgtttatttgaagtctttctccttttttgatgtaggtgtttattactgcaaacttcccctcttaccattgcttttgctgtatcccatagattttggtatgttatatttccatatccatttgtttcaagaaatttaaaattttccttcttaatttcttcattgacctatcagttgttgaggaacatgttatttaatttccatgggtttgtgtagtttccagggttcttattgttattgatttctagtttatttcattgtggtcagaaaaaaatagttgatatgatttctaactttttgaatgtgctgggacttgatttatatcctaagatatggtctattctaaagaatgttctgtataccaatgaaaagaaaatgcattctgcagcagttgggtgaaatattctgtaaatgtgagttagtcttgttttgtctagtatacaatttaactccagtgttcctttgctgattttctgtctagatgatctgtccattactgacagtgggaagctgaggtcccctactactattgtattgcagtctatctcttgctttagatatattaatgtttgctttatatttttgggtgctctggtgttgagtgcatagatatttataattgcctttatcattataaaaatgaccttctttgtctttgacttgtagtccgttttgtgtattataagaataggtaatcctactattttttggttttcacttgcatggaatatctttttccatctctttcattctgtgtgtgtctttataggtgatatcggtttcttgtaggcagcatatagctgagtcttgtttctttatccattcagctatatatatcttttaattagagaattaagttcatttacatgcagtgttatcattgataagtaaggacttactactgccatttttctgcttgttttctcattgtttgataacttccttccttccttccttccttccttccttccttccttccttccttccttctttccttccgtctttcagtccttcttttcttttttccatcttcctttgtggttaagtgattttctcaggtaataggttttaatttgttgctttttatttttggtgtatctattataggtttttgcactgtggtcatcacaaggcttgcagaaacatcttgtagatataacaagttatttttaaagagatgacaacttaacttagatcacagaaaggaatagaaacaataaactaaaaaaacctctgtgttttaactctatctcccctacatattgatttttttgttacctcaatttggatatatttatactgcctattttttagcaggtttctgtatgtgttttcgtttttgatagatttgtcttttgggcttcatactagagttatgagtggattgcacaccacaattacagtattagagtattctgggtatgtctatatgcttaattttactagtgggttttataccttcaaatgttttctatttgcatgttagtgtttgtttttctttcaaattgaagaagctcctttagtatttcttgtaagatggatctggtgatggtaaattttctcagcttttgtttttctgggaaagcctttatttctccttcatagttgagggacagctttgctggatacagtattcttggatggaaattttttttcttttagcactttgaaaattttgttccactcccttctggcctgtttggtttccattgataagtctgttgccagatgaattggaggttctttatacgttattttcttcttttctgttgctacttttaggatcctctttgtccttggtctttgagaatgtgattattacatgccttggtgaagtcttatttgggtcagatctgtttgttgttctctgacattcctgtacctggatgtttatctctttctcaagttttggaaagttttctgttatttttttgagtaagctttttactccttgctcttgtttaactccctcttgaacaccagtgattcttagactttgtcttttgaggtaatttcctttatcttgttgacaatctttgttcctttttattcttttttcttctctgtgtattttcaaattgcctgtctttgagctcatttattcttacttctgcttgattcattctcctactgacagcctctaatgagtttttcagttcctcaaatacatttctcagtttgaagatttctgtttgtttttattactatttcaatctcttcatgaaatttctctgatacatttttgagttgcttttctgtgttatcttgaaaatcactgagttcccttaaaactgctattttgaattcttcttcagagagctcacatatcaccatcttgttagggttagtcactggatccttgcttcgtttgttcagggaagtcatggttccctgtttgctgctgtcacttatgaatgtatgtgtatatgtttgcattggagaattagttagttatttcagttttctctgtctggattcttttgcttttcattggatatatttgcttaagagattcattgtaatttacctgttgaatttctttcttttcccattaggtcactgcctccttttcagcattagatggtgccttaagcccaggtttgtctccactctaataaacaattggagcactgtccatcccaaatggaaatggtgccaaaggggatagcctagcaatgtgggaaggtgaattaggggtttgtgctcaggggacctgtgggatgaacctcctacagcatggtgctgctaagcagacactgcaatttggtatctctttggccaacttatagagcaaagtttccagagttggggatagtagtcctgcctcctcactttgtctctggctgtccccagggatatttcttccttcaagcactccccatgcttcctgtgagttgaggtaggaacaggtatcctgccagggaactcaagatgatggggaagctgcccgtcaccttgattttcctttttccagtgttaaactgagagttgggggaaattttccacgtgcttggtgctggcagattggggagagggatgtcttggctgtggatgtccccttctcttaccatctacttggagcttttttacttctctgtggcactgagaactgtctcatcctcatattctagttttgggatatttgtggtgataaccttagtgctgtaaatttggtttttgttttctgtgtggggaatgaagccagcttgcttccacgccaccattttggaaccagaaacctcattgtattacaccttatagtgctctgctgaattaaattcaaataggaagtttgaacaaatttacctcctcaggaattatcctaaatccctgctactcaaagtgtggtcattgtaccagtagcattgaactcacctgggaacttgttagaaatgtggaatctcaggcccaccccagacgtactgaatcagaatctgcattttaataagctctccaggagactggtgtgttcgagaagtaccatcctgcaatattctggtagactcattttgataggtgctgcctttagctgtttgtagtgttatatctttaattctgtaacatgacagctaatggctatatattttggcaattattttaatgccacacaataaccttttcctggatgaatgttaatttctctgaattattgatcatgcttactctatctcaggatgcaagcatttgggctcgtttttctagttctagtagagtaaaagttagtatgcatttccctctccacttctaccctcttatatttcattttttgccacaagcaagattcctttcctcctcaactctccatcttcatggttctcagggatatgtaggtccttaagcacagtcagcattttgctcaagtggaaaatgttcatatatagctggggtaatgtgccaactgtgtgcatgtgtatctggtttatacagatggaatctcaggttcaaatgttataatcaagctatcttgcaagatagtttctacactcttattttacagtatgtgaactttctttttgttttttgctgacaaatgttgattgctttatttcagtggtcaggattgctgtagaggtatgcatgatatgccatttgattttgtcctctaagccatagttaagaagactttgtattgtgagctatcacatacatgagttttgtgtattttccctactttttaatgaacttaatgtcagctgttgattctggccagatttcacagtgacatcctgttatgccacagggccacttaaacaaggaggagatccatgtcagcaaatttctagctaattcagggatagtctttcaagttacatattgtttaagttttaactctttaaaaagtggtcttcatataacatcacatacatttttagcaccttaggtagaagttgctaaaaatgattttgtctttaaggataactctgatcactgtattgtgaaatgcgaggccattgtaccatggggcatgattttctctgaggcagtggcagatgggactattggcagtgggactatttcttgttccatcaaatgacctctggctgctatatttttgagtagtccactttggttttactctgttgttccaggcttggttgctgtccagtctcacagtagtgtactttgcttctggtgtattctgtctcctgagcccttcgcccttctattggggtgcttctaatttgttgtaaattaaaaacctgctagataatcttttttttatttattatactttaagttctagggtacatgtgcacaacgtgcaggtttgttacatatgcatacatatgcaacttgtgtatgcatacatatgcaacatgtgtatgcacacatatgcaacatgtgtatgcacacatatgcaacatgtgtatgcacacatatgcaacatgtgtatgcacacatatgcaacatgtgtatgcatacatatgcaacatgtgtatgcatacatatgcatacacatgttggtgtgctgcacccattaactcatcatttatattaggtgtatctcctaatgctatccctccccacttcccccaccccacaataggccccagtgtgtgatgttcctcttcctgtgtccatgtgttctcattgttcaattccctcccatgagtgagaacatgtggtgtttggttttctgtccttgtgatagtttgctcagaatgatgaaaacctgctggataatcttgctagaatatattataattaagaataggctcagagtgatgtcttcagagggtgagctaggaatcatataggtacttttatggtgcaaacttgaataaaatgtgtgagcagccacagctggtttggttaattttgcctttgggttatttcactgttcactcactatctgctatgtgctaggaacatatggaattgaagtaaacattcttgtcgttcccataatctgttctggggatagataaaatactaagcaaagcattatgcctatatgatataggtgtaaacactgtactgtaggcttgcatgaggagtgtcgttataaatttgaccagacttactgaaagatgtaagattgggtggaaggaaggatactttggtcatggagagacaggtagggtgtaagggagaggatgtcctaggtggaagcaaaagtgtgagcaaacatgatcaaataaagggtgtgtggaaggaatggaatttatttgggtgtggttgaagcatgaaacatctgtggtggttacccagaggggaacatcgaattgttattcacacgcctgctgttcatagcatatagctcctagaaggtgggtagatgtctctgcttatgttgtgtgaaaattaaagaagcacatgtatatcttccaatgtagaaaacaaagaccacattggaagattttctcatcaggggcgccattttacaaactaaagctctttaggagaagatacacagcaatttccttgtcttgagttttgaaacatttttttttaaaccatttgtaaaactttctaaacttcttgtcctgttcttgtgttttagagtttacatctataactgatagtattatttttctttgcacttacagtacggccaagtacagcgtgttgacatttctacctcgattcttgtatgagcagattagaagagctgctaatgccttctttctcttcattgccttattacaggtaatggttttttaacagttccttggaattcacttaattacatgtaaaatgagattttgctaaaggttccttaactgctaaagtgttataatcttggaatatagtttgtttccctcctctagtcattgtttgatagagtgaacaagcctgactttgtatacagggagatttcttttggtatggccttgaggatgattgcagtgactgaaagaggcattgaaaagtggccttagggccatacttttaagcctttttctgttccaaacacataaccaatgttggataaaatttttaaaaatatgtaaaatacgtagctagtttttaaagtaaggtaattatttttgagtaacagaaatggaacagaactgcaaaagtgtgaaacgtacgtgactgccgtaattttctgttcatggagaggatttttaatgtgccaacttcctacttgtggtctcttatcttccagcaaattccagatgtatctccaacaggaagatataccaccctggtgccattgatcattattttaacaattgcaggcatcaaagagattgtagaagattttgtaagtttttgcttttggataataaaatcattgtatgcagtagataataacttatgtgttgcctcgggtgatatatttaaggcaggaaattgggctatagcttaaccagcctctttagacacctgatggtatttttagggggagttaatgtatactcagagtgtcctaaatacctgtacagtgacactaaacagttcaaactttgttttcaaatattaggtctctggagccccattgatttttatcactgatgttccttatagcctgctttagagcttgctaatttgggcagcaaatgaaagattgctgtgttgtctaggatggcagcattgtctcgctctgcctgaggcaattttacaagaatcttctcccctcacaatcatcctagtgtacctccaagttcattggctacagcaactatattccttttccctgtctttcttgctctgtctccccctatatatttgtgtgtgtgtgtatatatatgttatatatatgatatatatgttatatgatatatatatgttatatatgttatatatgatatatgttatatatgatatatgttatatatgatatatatgttatatatgatatatatgatatatatgatatatatgttatatatgatatatatgttatatatgatatatatgttatatatgatatatatatgttatatatgatatatatgttatatatgatatatatatgttatatatatgatatatatatgattatatatatgattatatatatgatatatatatgattatatatatgattatatatatgattatatatatgttatatatatatgtttgcatgtgctgtctctctgtctctggatcttcctctcctcccttacatacacacacaccttgctttcacaaacatatatgcatctttctgggaataggtatgtaaataaatataatacaggttaagcatccctaaatccaaaaaccccaaatctgaaatgcttcaaaatccaaaacttttgcatgccgacatgatgccacaagtggaaaactccacacctgacctcgtgtgatggctgcacaaaattattataaacactgtatgaagttaccttcaggttatgtgcataaagtgaatatgaagcataaataaatttcatgtttagacttgggtcccatcccagagacacctcattgggtatatgcaaatactccaggatctgaaacaatctgaaatatgaaacacttctagtcccgagcatgtcagataagggatcttcaacctgtacacatcgaagcaaagttactttatcaataaaatgaagttggctgtttgttgctgggtttatcacactgaataatcatttcagtctgatctaaagcaaggagtgaaaagttttgtacttccaagtgctagaaccaaaataaaataattgaaactagaggagaccacttctaaacttagggagtgctgatagatcacaaaattgtctaactgaattttacagcatgagcattattggcatttagtttccttgtcccctgtaatttcctgattgttttgtttgctatttcaattattcatgtggaacttttgaatgttaaactattttttttctttctgtaacagaagcgacacaaggcagacaatgcagttaacaaaaagaaaacaataggtaagatcccaggctgaaggactttttccactggaaaacttaagaataaggcctgcatttaaggaattttaaataagtagtgaatggtattgagataaattgggaagatgatctataaaataaagaaatagtaaaataacaaacaaactgaacataattttagtcctgataattaagtttgaacagcatttgtgtattttagaatgttagaaaaggttgtaattttcaggaactagacagtttttatgtccataaaaagtctaagcattcatgtccttcatttataatctctccttacttccctcttctactttttattgttttatttctacaacatcaattttttgtttgtttgtttcattttttgagacagggtctcactcctgttgcccaggctggactacagtggcatgatcatggctcactgtagctttgacctcccaggctcaggtgatcctcccacctcagcctcttgagtagctgggactacaggcaagcaccaccacccccgactaatttttgtatttttggtagagatgggtttcaccgtgttgcccaggctagcctcaaacttctgggctcaagcagtctgcctgccttggcttcccaaagtgttaggattacaggtatgagccactgcgcccagctgttcagttttttttaaattgtggaacagcaggctttttttttcttctgggctgaaaataagtagatttaacttacatacatacataaacatttatgtgtatgcatgaatgtatatatgttacagaggtacataccatacgttggtgttccattttgagggtgggggtgctgatgttatgccatcatggctaaagatagggtatgttagaattaataaatggaattctaaaagaaagcttttggattttaggaagctgattcaatttaacaccagtattaaccaatattttatttttctctttttcagtgttaagaaatggtatgtggcataccattatgtggaaagaggtaaaaactaattttaaagatgtaccagtactattggtttgaagacgcgtaatgaattgctggtcttgattgcagtataaagtttctgttagacacagtagagttttccatgaggtctgctgagacctgatgcgtgtttactccttcccttgcaccttctagtaagggcccaatgtgtcacttcaagctatgaacttcatcgctcctgagtgacgtttctgaaatctcaaagtattttctagtttctaaatccaatttgagaaatattttccctggtcctctgttgtcttaacctaagttaaagtttatttttgtttttagcatttgtgattctcactttaaacatttttgggtggaaaggtcattaactacagagtggtggaaagggggcaagaaaccaccccatttccgttctagcacagcagttagctgctcttaataatagcaaggaaagctttgcttccacgtccctggaagtatgaggtttagagggttgaagaatggtgtggttttttggttgtttatggtgatgagtagaaaatttagaagaaatctgccataccatctaggtattttatatctcataaaattagctttttaaatgagtgttttagctggaccttcttaatggacacaagatgtgttgggggatgactctcattagtccagcattcaaagccgattaacatgatttcaaaagaaaacagctttttagaagggtaacttgaagtggttcttcttgctaaataaacatttaataaacaatgtttttaaatgcctcttacagtcttttatatctgaaaaatgcccgtgatatggtaactgcagcatttgctttagttttcgttttactttactttgttttaggagaattcgccaccctttaaagaaatttctcctttatagtgttttacagtaacaccttaacctttgctgcaatcttgaagtcgtatgctgcaaacattcatcaacctcacgtttggaaaggtcatggttcttggtcaggaggttgggaattcttgactcaaagtgggagagatgctcccaatgctgaaggaattcaagggttctcccagcactgggaaattgcccctctatttctctagggttcttcttgttactccctccccagaaaggtatcagtatcagctagagtgaagaatgatttggattcagagggcctgacattacttgaaacagcagaaaatggagtgatggtctctaattgatggtcttctgtggtccaggagctgacagctttgcagactcctaaaactcatgactgtttccatcgttcatttgggagaaaaacaacaataacaaagaaacaccagttatgtactgtaccgcatgcagttttatttccatttaaaatgtatttacttggtttatttcagtggagctcctggcatgtgccagagattgtactaggcatgggaagaatgaagctcagcgcttcccttaaggagtttcaaacttcagtgggcatcccagtcaccgtccacagagctgctggaacccagatggctgggcccactcccaggctatctgattcactgggtctcaggtggggccctagaatttgcacatttaaacaaattactagttgaggctgatgccgatggtgtagggagcacactcaagaaccaccggtgtcctgggagagagaggcaactaacctaacgcagtgcagttgctgagctctgtgtaggagaaagcttccactttgggaagagctgggaggggccacctacctagacccagtggttcagatcaggaaagtctgccctccagagatgctctagtgcgctcttgaagggtgaatcaggggtaactagctgcggaactgtgagtagttcaatgtgaggatgagaatacaggagagggcagaggtgtcaggcaaggggaagctggctgtccttaaggtccccaaaatgataataatctaatctgaagtgctgaagctcagatctgctgtcccctgggctgtagctgagtcacgggtgagcgccaagaggcagctctcaggtggatctcagtggctttgattgacttcgagaggatctttcagctacttcctcaaaattaagagacttgaggaactctctgaggctagagtggattcagggatctggaaggtttctgttcccagtgtactaattctttgagggagtattgcacacacaaggaacaatcatgtaagaacattaaaaccatttccaggccgggcatgctcacacctgcaatcccagcactttgggaggctgaggcagctggatcactttagctcaggagctcaagatcagcctgggcaacatggtcaaaccccatctctacaaaaaaatacagaaatcagctgggcgtggtggtgcgtgtctgtaatcccagctactcaggaggatgaggtgggaggatcacttgagcatgggaggtggaggttgcagtgagccttgatcgcaccactgcactctagcctgggtgacagagcgagaccctgtctcaaaaacagaaaacaaacaaccaaaaaaaaattttttttcaagcaaaatccaagtaagtcatttcttatgtacacaaaacttcttagtacttggttactggaatatgaatgtttatttagagagtaaagatgagagaaagccataatttctcttatcctcccactttgaatttaaaaaaatccactgccttttttcatttgaaaacatgacaaattttcttgtctagtggttttttctttactaattacttcttctgatttttatatgtaattaaactattcatatgaaatcgttttaattttattttattctttttagacggagtctcgctctgttgctcaggctggagtgcagtggtgccgtcttggctcactgcaacctctgcctcctgggttcaagcgattctcctgcctcagcctcccaagtagctgggactacaggtgcccaccaccatgcccggttaatttttttttttttttttagtgagatgggggtttcaccatgttagccaggctggtcttaaactcctgacctcaagtgatctgcctgcttcggcctcccaaagtgttgggattataggcgtgagccactgtgcctggccaaaatattttttacttttaaaaaacactttcaattgacataacatccattgcttttgtactggtggttgttaaaacagctttgtggcattttccccagacactttaataaacaacttaaagcaccaataggatacctttcagtaaatttgcctttttcccaacagaaaattaaacatgggcacctgctagcttgtaagatctggcagtttttcacaagtttcgtatcacttgaaattcctggtttctaagagaatagtaacatggctagaataggaaatagaaagcataaatgcccactttgagctttgcaactattactgtactagtaatggtcttctggtatcgtcagagaattctaatgtccttgaccttcacactcatgatgtcctttcagttatgctcccactgatggagactgacatttatatggacctgttttatgccaggtgccgtgtatacttccttagtcactgcattcaccttacaaggccggtggcactgttttcctgtttcagacatgacacgctggggcgctgggaggtgaagcagcttgcggagatcacaaagctagcacacggctataaagctaggattggagttaggcttgcctgatttgaaagcccctgttctctctaccctagtgctttctgcgatgttactgaaaggattggtagacacttcgccatggtaccattttggagactacagcccttttccttggcttgagatcttctgtctagtggagtctgttccccaaggtggtctctgactttggccgtgatcctttttctgggaatttcttgaggctgtacaaatcttctccattttatgtggtatatttccagggggactttcaggtgcacttttcatgggtgaatttactgttgccttttaatcagagcattggccttccgtgcagcttgcccagttttgaatcctggttctaacactcagtggctgtattactgtgatcaagttattttgttttctgcacctcaatttgtaaaacagagaaaaatttataaaacagagaaaaatttatgtgtgttaacttagttgatccttgtagtcactctatgaaatatgtgcctttatcctcattatatagatgaggaaactgaggcacacagagtttatataacttgttcatcattacacagctcatcaggggtgcagtggggattgagcccaggctttaggctggctctggtggtgtgtgcgtgaccgttctaccctactgtatacagctatggaaatgctgaagtatttgtaaatggatgcataattgtaagaaaacgagatctttatagctgttctgacttagcccttttctccctttccctttccttttttattaaacatcattgcaaaaaaaggcaacattaccagtgtctgcatggaagcactttccttttgttcttgtcaaggaaaataatttgggcttctctatcttaaacttcatggcttagttatataataattttttcttcaaatatttaagcacctttttcaccatgtgtgttttgtttcttttctttcgtgcccctctgtcctcatccctgtctctctaggtggcagtgggagacattgtgaaggtcgtcaatgggcagtatcttccagcagatgtggtcctgctgtcatccaggttagctgtgctagtaggcaccttttttgcaataaatgttaagaacaataaaatattaagcagcacctggggcagtcttgagcagcctgttcccttctaccatcctctctctgtcccattcttccatttcttgtcatttcccttctcctgccatgacccttggtttctttctcacattcattcctttgtgctttttctgaactcttttatgtgtgttgactccacttagtctcctggctatttggggtttttttcttatttataggggcactgagtcaagagcagtggagtggtccattcattaatgtcaggttgcagcatatctgagatttcagaatctgtttcctgatgggccctgccagcagtctgtcctgcagaacccagtgctgcacattgatagctgttcaagaaccgtgggtgttttctcagcgtaatcgtgaccagcagatggtgtttgctcttcatccatccatgttttgccccttttctgtccaagtatcattttcatattctctaggtagttttattctaggaaggaatcatcactcagtgcagttcttgacttttttggggcttggtgcatgaaagtacatagctaggaaagaaagccaaaattagggcaagaattgacatctattcttgaattcaagattaaattgtgtgacgttaggactataacttcctatatttatacactgttgggaatcatagatcggcatgctgtttgcattttctttgattgcagacagcgtttcttgtattgaagttaatcactcattggattttaagcctaagcattaattttctgcttgagataatagatttaaaaataggactccaggcctgtggagggggaaaaagaaccaataacacagggcaggatttatgtttgtccatattgattgacaacaaagaaaccgttagaaatattaaaatattgatcacttgatagttcgggctttaagtctttaagtcttggctgtgaccttagaaaatttagtgtgtgtgtgtgtgtgtgtgtgtgtgtgtgtgtgtgtgttttgttttgttttggagacaaggtcttactctgtcacccaggctggagtgcagtggctcaatcatagctcactgtaagttcaaactcctgggctcaagtgatcctcccatctcagcctcctgagtagctgggaccacaggtgcatgccaccatgcctggctaatttttaaaaatttttttgtagaggctcatttttaaaaattttttgtagatgttgcccaagcttgttctggaactcctggcctcaagcaatcctcccgccttggcatctcaaagtgctggggttacaagcgtgagccacagtgcccagccagttttttttttttaacttggtcttaataccagattgctttagctgacatcatgtttccagcatgctcattattagtgtctgagtgtgtgctgtgtgctgaacaacctgttgaggaggttgtcccacttaatcttcccaataaccctggatagccttcttttgtacatgacaagattgagatacggagagactaaacaatttgccaaggccatatagcccataaaggtagtgctaggggatttttaccttaactagtggttttttagttggaagagtcaaggggtggttaatcactaactgtgtgaacctagctaaactcaaagattagaaataggattataatatctgttatgcttatttttatttttcgagttttctatctttaatgctaggtgttttgattaaaaagttggactcgagatgtaaaaatggcagagaattaaagccttgccaagcctgtgcctcgatccttcaactcctctggctgttgttttcttcaaaaaatgtgtgtttctactggccatgccttgggcagcctttttggtcaggcccagccccagacttgaaggattgcctgaacccagtggttgggtctgactggggacatcacatgtttccctttctctttcatcttcagttcattcctgtcttcttgaggctcagcagtcattatgtggggcttacaaaggcagatcatctgggcaaatgactctctactggtactgagtcccaaagatgagtgtgtgtttcctttttcatccattactcctactatcgtggttatttataacaatttattttgaagggccaatcagcagacacagattccataatagagattttctaaactgtgaatttgtggaaaggaccttatgaaacttggctctttttttctctctccttagtgaacctcaggcaatgtgttatgttgaaacagctaatctggatggggagacgaaccttaaaatacgtcaggtaaagtcacctctgatgacttgtgttgttatggtagacacaactgcaaatgtggtccccacatatctttttctagagaaataaaatattcagccacaaagggttatgccttagccctaatggaatctatgggaagaatatgccatttatgatgagagagaatgtgtctcgaaaaagtaggctgcatcaaactctaggtcatgcagggtgccaggccttcatatagcgtcttattgagttctctgcctgtgatgctggagagaggggacatctcgatgaagctgagtggctgggaaggacacagcttagtggacaaatggagcagaaaagctccaggtaccccagtttacatcattgttgtaataaagattctaatcctagagggtgatataattagataaaaaacttccatgccttaaagaaaactattcttaccatatattttaattctaggatgaagaatagtcttttttggttctttttttttttttgagatggagccttgctctgttgcccaggctggagtgcagtgatgcgacctcggcttactacaacctctgcctcccgggttcaagcgattctcccaccttagcctcccgagtagctgggactacaggtgcatgctactacacctggcttaatttttatatttttttagtagagatggggtttcaccatgttggccaggctggtctcgaacccctgaactcaagtgatctgcttgctttggcctcccaaagtgctgggattacaggcatgagatactgcacctggccaagaatgaagaatggtctttaacatataaaaattttaagcactttgaagcttaaaaaacttttgctgcttaaagttgaattcagcaattctatccatatatctttcttttctactgtagatatttgctttagactttttttttccatttaaagaacagttacagcctgggcaacatagcaagaccctatctctacaaaaaacttaaaaaatagctgggcatgatggcacatacctgtagtcccagctacttaggaggctgaggtgggaggatcacttgagctcaggattttgagccttcagtgaaccatgattgcaccactgccctccagcctggaggacagagtgagaccctgtctcttaaagaaaaagtgaagagtgctagataatgtaaaatattggagggctactctattctatctttatgaccagtgttagagtacagctagtagattatgcttgctgtaaggtgctggggtatgttaattattacttatgcacggatgtttctagtacagtggtggaatcttaactttcagcttcattacattcttttgccacttttgcattagatcgttgtggcaaaagctactggaaaagtctgccttgaggggctgacagtttgacttgttagccccccaaattattgcactggagatgccttatttttccttttgattaaccatagggatgctgaatggtgtccctaagcacagaagattgtgtttgacttcctcttttggtttaatcttttagggtttgagtcacactgctgacatgcaaacacgtgaagttctgatgaagttatctggaactatagagtgtgaagggcccaaccgccacctctatgacttcactggaaacttgaacttagatgggaaaaggtattatatgccttttcttcattgtcttttaaactatgtgactaagaattactggagctttggaaaatatgtttgtttcctagttttgtaatattttaaaacagtgagatttcataccctttcaattaatttaaagccttccttagatttaagaaaaaaaccctgagcccaagggcctcagatgaggctcaaagcatgtggcatattctttctgtgcctactctctgccaggcaggagaaatggttttagctgcataaaattgtccagaaaagcagaggagagttatctgaggtgtatacaagctaatacacttgttacagaaatgtgtgtatgtgtattttttttttttttttgctaaccaccttctaaggagcgttcatttgtttttagaaagttgagtgaaatgaacacttattcttcctttagaatattcagtgccctcctgtctatattctgttatctttgttcttctggcatttgttatgttgttctggagttgtcttttgttctgatgttggagagcagtttctaccttctggccatgtttgtctagagcctcttgccaatgccccctccaaccctgtaacccagcctcttgcaatgtcctttatattttgacgacccaaggcttggaaggacctgatcataggaatcaacccaaattattataaatatgacaactaagtgtgactgcttcttggtttcatttagcatacatagctatactatgggctccccattctgagtttctaaattgtcactcaggtctttatttactcattaagtcatccttaaaaaaattgatatgataggttgctgctttttaaaattttactccttcctaatagtctgtaaaatacactagatttattttacaaataataataataatacttccaataataatacttaactacaaatgagtaagctttggttgttattttagcaacttcctttctgggtattgagtttcataacaggatcatgagagatataattacctgcaacattttatagaaaaagcattttttttctgtagtgatgaatgtaaaataaagctttctgtgggtccttttggggtagattaagccaatggtaacctttgttgtctgtgtttctcagtgaagtagttcaaattggaggaaagggaacatttgatttattgtgggttcatgtttaagggaaaaactcatgcttattttccagactatcattaaatatcattgttgttttttatttttagccttgttgcccttgggcctgaccagatcttattaagaggtacacagcttagaaatactcagtgggtctttggcatagttgtttatactggacacgacaccaaactcatgcaggtaaaacatttctatgctgatttcagtcttttttttctttctgcttttattgactagaaggtggaaaatgcagatgttgcatttaggaagttcaaatttgtctatgaacctaaatttggaaagaactgcctttattttagtttcttaggtagctttttctagatttctgttctcttatctgatatttgttaccgtatgcctgaactacaaatggtctttgttttctggattaggggaacaatcaattctaacttattttatcttctggacttaagcgggaattagttctaacttttaaatttctctttctacttctcctctttatcccattaattaggattttatagcaaattgccttatttaactgaactttagagactttaaaatcagttatttttgaaccgtttagttttcatagaccgaagaaaaaaatgaagttaaaatgattttgctctttttccctgttaatgttttttaaaaaactgtttgtgaatttataggtcacattgctattatgatgtattttgccagacaccttttgaaattctacagaaatcagtgtccctgtatgtcatttcttacatttgtttggtatcacttggcatcttatttttgccaatggtggctattaatgagaattggcttttcagcttgtctgttcttttgtataacttctaaaatgcacatttggctgtatttcttgatttaaaaatatttagtgaccacgtaccaagtctagtgctagaccatatgggtgcaatagtgaaaggcccaggcttatcctcggggagccagttgggctaaggagtaatatagaatgacaaagtagagagagagatactggaatgtgtgtcattactaagtgctgtcagtgtgtataggagggtcattcaacctaggctggaagccagtggactacatgctaagaatgattcccgtggcagaagcacattttagatatcgagctagggaagggagactgttgtgttggtctcctctttgaggtcaaatgatagtcagatgaaagaggtaagtattagaggagatgaagcagtagacgttggtggccaccgcagctagtaaacacattggagacagggaggagagatgggattagaagggttgagagactccctgaagttgaagaggattgttggagttgctgagtgacaggctgatcagtgggtagaatcttgtctttgtatttctggggtagagagtttctagcatgggagacctgggagtgactcgtgtgagtaggaagacaaaggcagagctgttgaaggccattcaatgttgacaagtaaggaactgagagactaaggcatttgatgggccagtgctgtgattttgaagatgcgataatgatgaagctgggccagaaaggaatgccatgagccagttgtcaagtcttctgtgagtgacagggagcaactgagaggtgtggcctggctacgggggaggggcagaaggtagtgtagccaaatggcgtgaattttatgagtgagtttttttttttttttttttaacatggcatccaaggaataaaggtctagaagtattactaggtcttgaatatacatccagtaatgctaccttcagaggccaaaggatgcagatgtctactggcgcaccgtctgcttgggggtactcaagggaggcgtgtccttgacttgtgaggcaaggaggagagagctcttgagggagtgggagtacagagggaagttcaggagctggaagggtaggggcccaggtgcagtggcctgttgcagagcttgtgtgttgaagcaaggcgggagggctccatggcagctagaaaaatgaagagttggtgaatgctgagaggcagctcttgggtggatcaggattatttagtgtatctgaagtgtgcctgatccatcgcccctgctaggtccttatccattcacaagggctgactggaatgctttaagtttattgtttctgagcggcctgcatatgaagactttatcttgatgaatagtttagtgctgtagccatgcaagaactcaggaggctgagatgggtggctcattgggaccaggagtttgagaccagcctgggtgacatagtgagaccccatttcaaaaaaaaaaatagtttagtaccctgctacctagaaagtatcctttaactcccatagtgcagtgtcagtaacccttgctgcacgctttgggagctccactaaccacaaatcactacttctggcttttgtttgtttgtttgttttttgagacagggtctggctttgttgcccaggctggagtgtggtggcgcgatcttggctcactgcaacctcagcctcccaggctcaagccatcctcccacctcagcctactgagtagctgggactgtaggcacacaccaccatgcccggctaatttttgtattttttgtagagacgggatttcaccatgttgcccaggctggtcttgaacttctgaactcaagcgatccacccaccttggcttcccaaagtgttgggattacaggcatgagccacagttcccagcctacttctgttttttatgatgaagtggcagacagatcatgggtagctagctcacatttggtcaaggccccaaagctagttttaagattgtgcatattataaatttaagcactttccaatatttcttatacactgggttttttttttaacagattgtaatatggtttttctagagcatacattggtaatatagcttttgctctagaaaaccaatattacatgagttaattaaactatcttttaaaacgctccagtcttctcttcagtgagtaaggcatgcactgagtttgcattttgtgagtgtgagaggcacttttccttgtccctaggtgtgagaaacctctttgcaaggcttcttgcatgttgactgctcatgtatagaatgatggaaaaccccagaaacatctgtgctagacctgctgtgcctttagggctgaaacaacaggtaaaaataatgagctttcaaaaggaatataacacacatagctggaagccatcctgtttgtgaaataacattgtttgtctgtgcttgtgctacttgaccacagagaggaaactcaattgctgtcgggttcttctacctttttttttttttttgaagtctctcacctcaatgccttttgcccttcaagtttccttcagttcatgtttagtttacttacatgtagaaatatttatgtctataatttctattagttgatttaatgggaaaaagagcgattatcacactaattacagcgaacataattacaacaaatcatgcactattttgagtgatgcacatatatcaattcatttattcctcacaatggctaggtagtatgtgctcattttacagatgaggaggcttgcagcatagagtctcctagtaacccaagcttacaaaactagtaggattcaaaacacaggcagtctggccgggggcagtggctcacgcctgcaatcccagcactttgggaggctgaggcgggtggatcacttgaggtcaggagttcgagaccagcctggccaacatggtgaaaccccatctctactaaaaatacaaaaattagctgggcatggtggtgcatgcctgtaatcccagctactcaggaggctgaggcaggagaattgcctgaacccaggaggcagaggttgcagcgagccaagattgtgctgctgccctccagcctgggtgacagagccaggctccgtctcgaaataaataaataaataaataaaaataaaaaataaacaaataaaataaacaaaacacaagcagtcaaactccagagtcagtgtaacccaggagtccccaagccccaagccacagactggtaccagtctgtggctgtgaagaaccaggccctacagcaggaggagagtggcaagcaagctagtgaagcttcatctgtatttacagcagctccccatccctcacattactgcctgagctctgcctcctgtcaatcagcggtggcattagattctcataggagcgtgaactctgttgtgaactgcgcatacaagggatctaggttgctcattccttatgagaatctaatgcccagtgatctgtcactgtctcccatcacctgcagatgggactgtctagttgcaggaagacaagctcagggctcccactgattctacattatggtgagttgtataattatttcactacacactacaatgtaagagtaatagaattaaagtacacaataaatgtaatgcacttgagtcaccccaaaaccatccccacccaagtctgtggaaaaattgtcttccacgaaaccagtacctggtgccaaaaaggttggggacagcttttctaactagaattcaatggcctgtttctcaggagggaataaaatatctaagatacaggtctgatttcagcttttcaaaatctgacattttgacctgtttctatttataagtccgttacactgaagtagctgggttcttcaagaattttatggaagaatttataatacttgtaggaatttaacattaaaagctcatcattgggccaggtgcggtggctcacacctgtaatcctagcacattgggaggcggaggtgggcagattgcctgacctcaggagttcaagaccaccctgggcaacatggtgagacccctgtctctactaaaaatacaaaaaattagctgggcgtggtggtatgcacctgtggttccagctactatggaggctgaggcagaagaatcgcttgaacctgggaggcagaggttgcagtgatccatgatcacgccactgcactccagcccaggtgacagagtaagactctgtctccaaaaaacaaacaaacaaacaaaacaaaagaaaacccatcattgatcattgcaagtaaaaatgttcagggggtgggagtcagtaggccaaggttggctttccacaaagtgcacatgttgaagcttgaagttttgggattgttcctcttctgttagatgaaagataaagttttctaatcctcctaattggccagaattcagccactgaaaaagataaaaagtcaataataaatggggtatagaaatgaggtttatgataatttttttcctgcctgtacatttagtgaatatttattaagaatgatgagatcttgcttagtttttaagagttaggatgaccagtcctggacctggcctgctggcccttacgttgaggccagacctggatgtgtcgtctcagttgaccttgatacagtatttgattgatgataagttggcctttactaatggatttccatttagactcctgaggatttttaagtccgtaaaggatgaataatttagacaaataaagtaaaagggaaaaaatagaaataaaggaaaaagctgctgtgttgtttagatatttaaaggacttagcttttcaaaatcaccagtacaatcccccaactcctctgcccccaaagaaaactgtggggagatagtatttttggtttgccaatagaattcaaataacaatttcagtgatgtggtataaatttttcttggagcttaggagtgaattgcctcatgttttcatctcagttttattttcacattgtgactttatttgtattcttatctttggagacattttcatcctagctcttttaatgatcagatcaatggagactagtgaaggagaatgctgacttaagtttggcacaaggtaccatttttatggttagtgccttacaaactctcagattatccaaacttggcaaattggtgttgtctcttaaaagtccgggcccggccgggcgcggtggctcatgcctgtaatcccaccactttgggaggccaagacgggcagatgacaaggtcaggagattgagaccatcctggctaacatggtgaaaccccatttctactaaaaatacaaaaaaattagtcgggcatggtggcgcacacttgtaatcccagctacttgggaggttgaggcaggagaatcacttgaaccggggaggcagaggttgcagtgagccgagatcgcaccactgcactccagcctgggcaacacggtgagactctgtctcaaaaaaaaaaaaaaaaagcctgggcccatgattcatggaaggagacctgcaggctgacactcctgtgtgagcctctccctgtccaattcctgacttctgatttaagtcaggaattatttcacccccaggaatggattataaataattcccctgtggctttcctctcttcagtgtctccttccccaacctgctgttattactgtactggtttcctctggctgctgtgacagatttccacagttttagtgacttaaaaaaacatgagttattgtgctgcagttctataggtgagaagtctactatgagtagtagactccctgtgctaaaacccgagatgttggctgctcttttctgcaggcttcagaggggactctctctgatcatttctctgtctccacctctccctttgagcacaattcagaaagcttctcccttttgatgacccttgtggttagattgggtccacttgggtaatccagaataatctctccctgtctcacagttgttaatttaatttaatcccatccgcaaagtcccttttgctgtataaaatagcacactcaggtcaggcatggtggctcatgcctgtaatcccagcacttggggaggccgaggagggtggatcacctgaggtcaggagttcgacaccagcctggccaatatggtgaaaccccatctctactaaaaatacaaaaaattagtcgggcgtgatggtgggcgcctgtagtcccagctacttgggaggcgaggcacaagaattgcttgaacccaggaggcggaggttgcagtgagctgaggtcacaccactggactccagcctgggtgagagagtgagactccatctcaaaaaataaaataaaataacatactcgcagtgccccacaagtaggatgtgggcattactggtggaggagggggtggtcattagtttgcccaccataagtaccttcagatattttttaataaaatgacttcaggtgcataactgtctttctcaaacagttgtgttgactttcccatggctgagaggatctagtcccaaatgttccacctgaactggagtgattcttgaatctagccttaatgaatctttctatactctcctgccaacactggcctcagctccacctgggctggtttccccccagcagtgagaaggcaggtgctaagcctgtgataaggttgccattctccttccgtttctcctttgctgtctacatcattcaggatgccactcagctttctcctgtccaggcccttcctgactcttcttggtcctgcttcttgttcccagttctccaagtgaactttttgtccatccacttattttgaaaccctctaatgttctgttttgcattattgatatgtatgtgtttgtgtatgtcttttttattcctcaaattctgagctccgggaggaaaaatatgtgctttagaaatatctctgtgtatttattgcagagctgtgctattatcgtgaaggtcttctctagatttttatggtatggaatgtctaagtttctcttgaattaccagtgttctgatttctttgaaactggactatatttagaacctgttgtgttctaagataaggaaagtgacaattatatgctaagatataatcataagaagtacagaatgaatcatgtaatgttggaatgtgttctttaaactggtagagtatgttgtctttcttcattacttaaaactagctattgattcaggagcatggtacacttttgaattgcattgattatttggcaaaaaaatagtcttttacttgttggttgttaaatatggttgttttacctcctttcccccaaccccttgccccaaatctgttctgtgacccttactgactttcaatgctgttgtgtagaattcaaccaaagcgcctctcaagagatcaaatgttgagaaggtgactaacgtgcagatcctggtgttgtttggcatcctcttggtcatggccttggtgagctcggcgggggccctgtactggaacaggtctcatggtgaaaagaactggtacatcaagaagatgggtaagtgtcggggtgggttgcttgttccagtggaagaaaaccatttttgagatgttcttgcagccatggttgaagtgtggtgtccctgctgtccttctgttccctttggttactgtacataatgccagcctttcaaggagaattgagattaggatcatgtgatgaaatgaagatgggcacatttgggacttgtcttatactcaaatggttatttttaaactctgtgttaaagtattttcttagtggttgccctaggaattacaatgtatttcccaatttatccaaatctacttttgattaatactaacaattctagtcaaacacagaaatgtcactccagcgtacctccatttcctctcctgcttggtgctgtcattgttatattccatttatctgtgttgtcaactccaaaatagtgttataataatttgtgtctcttaaagaagctaaaggaaaaaagaaaaaaagtatattgatagtgttttttgttgttgttgttttgagacggagtcttgctctgtcgcccaggctggagtgcagtggtgtgatctcggctcactgcaccctccacctcctgggttcaagcaattctcctgcctcagcctcctgagtagctgggactacaggtatgtgctaacatgcctggctaatttttgtatatttagtagagacgggatttcaccatgttggacaggctagcctcgaactcctgacctcaggcaatctacccgcctcggcctcctgaagtgctgggattacaggtgtgagtcaccacgcctggccagggttgttttatattaacatatttacttaccatttccaggtctcgctcttcatttcttcctttggatttaacagctggtgtcatttctttgcttcatgtatcttcattctctcctcactcctttgcactgtcatatatattacatctgtatataagttcaacaatgcaattttatgatgcttttagcaattgcttttttaaaattgggaatatataattatactatcttttataaatcctgtagaattatcattactagtgtcctttgtttttgtggattttaattactgtctggtatttctttcatcctggagaacttctttagtatttcttgtatttgtaattgtcaggtagatatttgtttataccttacagatatttgtaactattggaacttagagatcctatttagaaactccttaattctacaggagaacaagagagcaaagtaatatgtcaggaagaaaagcaaccagcaggaaaagtggaagggttggtagtgagtaggaagtgaagggattgtggaaaggtaaaattactggccagcatatgcctgctccccctgtaccttcccagctccttgtctttccatcacagccacgcttcaaaactctaaattggaatcagactaccaccatttgatgtaatttcctgggaaaaaacctagtaactatggtttggagccattacaaattatcagtctccctccaatcccagccttctgctatctttattctcattctagttcccttcacagctttaatatcagttaaacgctgttgcaaccttctccttaagcctcttgctaagttaagaagatctcactactttacccttcaagcagaagatcatggctgtcaaggaaagaactttccctttgatacccccagaccttgtccccctctccctcccccattctctgttcctcctggagctgatgctgcctctgctgtggactccatcccctagggtcctgttccatccttagggaacttgttccgtccagatatcccttctcttatctttagctgggctcaagccttctctctctttgtctgcttctcttgttcacacttttgtccatctttccagctctttggagtatccccaatatacacgtaccttagtgagcttgtaggtgttccttacaaccatttcaaaggcctgtcttcttttctacattctttcaagtttgcttcttttctctgttcttcaaaacttgaaagcagcatttcttcttctggatggccttcagtgaccatgccttcccattagaaagccttctgtgttggttcccgctacgtcctgtgagcctctctttagcggatgcatcctgctgtgcagtcgcattgtggggcctgtgtgcctcctacagaaagcagcctttgaactcacggttcctgacatgcaggaggtgctcaataactattttaacatgaatctctaaatgagccaatagactttggttgtgaacacctttcagatactctggtttccttccacagacaccacctcagataattttggatacaacctactgacgttcatcatcttatacaacaatcttattcccatcagtctgttggtgactcttgaggttgtgaagtatactcaagcccttttcataaactgggtgagtattaaagcagagttgaatcactattttccaatgctatttcagagcctttggcatttaattgagcactcaaaaaagaagaactatattcatttaccattaggtccaggggcttaaactggccatacaaagaactggccagggatcaccagtgagggtgtttttggggaatggaagggcagtggtacctattcaaggcgttgttgtgaggattggtcagagaatggggtggaatgctgagccagtgcctgtcatctggctgcacctgctattcacgcttttaacatctaattaaggctgaagaaaaggcctcttgggtgtgtttactatagtggtcactcgcatatcaaaattcattgtgatagtcaacttggatttgattgtaagggtggagataagatatttaaaggactgccatggctcttaagtagtggactttagcagccagtatttgtagaccaggcactttgatgtgcatttttatttgatcttcacagcaatcccgtcagcaaggtgagaatcatgagttagtctaggttgtgaaatgattattttgaaatcaaatcatatctatataaatataaatcatgtgtgtgtgtgtgtgtatgtgtgtgtgtgtgtgtgtgtgtgtgtgtgtgtgtgtatttcttttttagatgaagtcttgtgctgtcacccaggctggagtaaagtggtgtgatcttagctcactgcaacttccatctcttgggttcaagcgattctcatgcgtcagcctccctgagtagctgggattacagacatgcaccaccatgcctggctaatttttgtattttgagtaaagacagggtttcaccatgttggccaggctggtctcgaactcctgacttcaagtgatctggccacttcggcctcccaaagtggtgggattacaggcatgagccactgcgcccagccaaaatcagcatttctattaaaataaaagggttttagattacccattcttagcttcttttctgtgttaatctgaatgaagaattaatggtatatattttctgaaatcctgtctcttgttctctctctctcaggacacagatatgtattatataggaaatgacactcctgccatggccaggacatcaaaccttaatgaagagcttgggcaggtgaaaaagcctctgggaactttgggaatggtgacacgagcatgagggaaaatgagtgttagcagaagaaccatggaaagattttgcaaaaatacttctccatgaacatggctagaacatctgaagagctatataatacttttgaatgtgccagtaaatataagcgttactcagttttgtcttgctttttgagacacagctatgtcgtatcacccagaagtaaccagaaaaaaaaaagaagtaatataaaaaatacagtgcaacatcatttgggacgcttaaaaaagtgttatcagaagcaaataacggggaaaacgatggctgagatacttagatattgagtaaccctacaaaacgtgtgggggccaatttaaaggacatgcatttctcgcatgttccgaattttgtctctggaatattctagggaacagtatcttttccacctttacccctgaactcctcttgcctttactaagttgggctttgcattatgtctgtgtctgacattgacattcctgtaaggaataacctctttttaaatgtttaatttaatttaatttattttttcaatatttattttagattcgggggtaaatgtgcaggtctgttttgtgggtatattatgtggtgctgaggtttggaatatgaatgatcccatcactcatgtacctgagcatagtacccaacagtttttcaacgcttttccccaaccccatctagtagtccccagtgtctcttgttcccatatttatgtccttgagtatgcaatgtttagctcccacttaataagtgagaatatgtggtatttggctttctgttcttgcattaattctcttaagataatggcctccagctccatgcatgttgctgcaaagaacatgatttcattttttttctggctatgtattccatggtgtatatgtaccacattttctttatccaatccactgttgatgggcatctaggttgagtccatgtctttgctattgtgaatagtgctgtgataaagatgctgcatgtctttttgttagaaccatttgtgttcttttggatatatacccagtaatgggattgctaggtcaaatggtagttctgtattaagttctttgagaaatcttcatactgctttccacagtggctgaactaatgtatactcccaccaatagtggataagtgttcccttttctgtgcagcattgccagcatctgttgttttttgactttttaatgataaccattctgactggtgtgagatggtatctcattgtggttttgatttgcactcctctgatgattagtgatgtggagcattgtttcatatgttttttggccacttgcatgtttctttggagaatgtctgttcatgtcttttgctcatttttttaatggggttgtttggtttttgcttgttcagttgtttaagttgcttatagattctggatattagacctttgtcggatgtataatttgcaaatattttctcccattctgtaggttgtctgtttactctgttggtagtttcttttgttgtccagaagctctttagtttaattaggtcctacttgttgatttttgaggactaacctcttttgaatgccttttgccattaaagattttgacttcatttcatacaccttattcaaacccaccaggaaccctaaggggagggtgctgtaccttcattttatagagaaggaaaggagtaacttatcgaaggacacctggttattcagtgtcagattggggacttcgggttgtctgtcgagatctggctgttccaagcttccctgcctggtgaaggaatactaccatgttgcatctcccctgctcctcattatccctctgtgaaaatgcaggcgacatggctcattgatctgagggttagaaaaactcccttatggaggtaggcttgctttcttcatttttctttcctcgaggatagagtgaattctgtgatggtttgtgtatcatttttgagtttattgccagaaaactgaggttcaaatttgtagactaaaatagacctttgtagacaaaaaaaagcaagtgattgtgtttctttgatataattttccaaacctacttaatttttgtctttatctttccttaaattgtgtatattcatataagtgctctaaattcttagtataacaggatggattgttattacagagaatgtccttggcacagagcacaaatcctcccattgcctttggggctctggtcacaaagggctgaatacagcacccagagcaggccttggaccttgggctgtcaatcctcatttttttttcttttttttggcttatgttctctcattctagaatggctttgtcatttcctttatctgttggtaaaatccttctcctgtaagaatcagtgagttcttggtgcatatcaggctaaatttgccttctctttgaactcttctccagttttccgggcttggttagtctgtcttctatgttcccataacagtcttccaaacataaatacagtaaaataaggggtatgagtgatgtagtgtccatttctctctggagactttgtgagggcgtgggtgtgccctatacaggtctttggttgcctttgttagtttagcacagtgtgcagtatataattgtttgcaggtgtcattgaactggacctgaataatttaaggattgaaagtgttcaagaagtacccatggatgcttcagtagttcatcctaattgaggatatggggaaagtttgcatgaggaagaaattttgagttggaactttaaggataagttaaaatttagtaggcaaagtgatagcaaatcttaataagcccttattataaaatgttcattaaaaatttttttttttttgagatgaagtttcactcttgtcacccaggctggattgcaatggtgcgatctcggctcactgcaacctctgcctcctgggttcaagcgattcttctgcctcaacctcctgagtagctgggattgcaggcacctgccaccatgcctggctaatttgttttgtatttttagttgatgttttgccatgttggccaggctggtctcaaactcctgacctcaggtgatccacccgccttggccttccaaagtgctgggattacaggtgtgagcctctgcacctggcctttagtttttttatatgatattttaattttcttaaaaatgcagaaagaatcctgcttacttaaaggcagattctactaaattttccatacccctagacttactgcatgtaaaaacttgtttaaagtataaattagccctaaggtacgagtattatatgtagatgtagtatttgacttctttaggagctttaataacttgaagtccctttgattgttttcaaaaaacttcccagtgtatgtttatattgtatcattaagaaaaattactgagtaagcaattcatgtaatcagtccctcttctatacaacagtaaaacactgcttccctagaccagttctctgggatctctggaaggtatctagcactcagcaagtcctgacgcctttttggaagaccactgagaaactggagtttcctctggaggcaattctgttaattactctccctcactaatccatgacataatttctcaaatgttacgtgtagaatgatggtgcatatcattcagtagcacatcattcagtcagagctcttattgcaactccctctgcatatttcggtacactttgattatataattagttatggaagaaggtttgtaagtggtctaagcattaaaatattaatatattttttgttactaatttgcttgctttagggaaatctacccgtttcatacaggttttgaaaaatatagaaggaaagacttcatttgttgatctttgcatctcaatacttcctgatgtatatttcttttattctttggtttaggtgaaatatctcttttctgacaagactggaacgcttacatgcaatatcatgaactttaagaagtgcagcattgccggagtaacctatgggtcagtgtgtttatcatttactgaaaatttacttgtattctttcaagaaaataagtttatttttagctacttagtcaaatatcttgactttctgatgttttgaaaggataaagtagttactatggaatgtgtttgtaactgaatggatcccaaattaaactctgaacagttaaaacatggtttatttctgactgggtgcagtggctcacacctgtaatcccagcactttgggaggccgaggcaggtggattgcctgaggttgggagttcgagatcagcctggctaacatgatgaaaccttgtcactactaaacatacaaaattagctgggcattgtggcatgtgcctgtaatcccagctactcaggaggctgaggcaggagaatcgcttgaacttgggaggcagaggttgcagtgagccggaattgctccactgcactctagcctgggtgacagagtgagactctgtctcaaaacaaaaacaaaaacagaaaaacagcaacaaaaaaagtggtttatttctgcaaatattaacttggtaagaagtccctgagaatctgtaagtttgtatatctaatctaagaattagatcagttttgatcagaatgtctgtcttttgatcacagttttgtgaccactctgttttccgtttctctggcagtcacttcccagaattggcaagagagccgtcttcagatgacttctggtaagtagattctagcacttcttgacactttagtggaaaagcttttggaataattatttattattattcatttacatttttagagacagcctcactctattgcacaggatggagtgcagtgatactgtcatagctcactgtagtcacgaactcctggattcaagtgatcctcctgcctcagccttctgagtaactaaaactacgggcatgcaccaccatgcctgactaattttgtaattttttgtagagatgaggtctcactatgttgctcaggctggtctcaaactcctggcctcaagctatcctcccgctgtgtcttcccaatgtgctgggattacaggtgtgagaaaccaggctcgccctggagtaattttattagcatttctcacctgcctatttttgtatgtaaataaaagttgcatatatgttgttttgaaagaaaaccagataaaatttaaggatgaacatggctttaaaagtccagggatactataggacttttaacaaaaaaattgactgcccttggttcagtgtttcccactcactccctattccctggaggcagccaacctcagtgcttttgctttttaaaaaattttatttttatatttcaaaataatgtttatattagtttttaaattaaaaacatttaggacaggtgtggtggctcacacttgtaatcccagcactttgggaggcctagacaggcagatcactggacgtcaggagttcgagaccagcctggccaacatggtgaaaccctgtctctactaaaaatacaaaaattagctggatgtggtggcgggtgcctgtaatctcagctactcgggaggctgaggcaggagaatcagttgaacccagggggcagaggttgcagtgagccgagatggcaccactgcattccagcctgagtgacagagtgagactcttgtctcaaaaaaaaaaaaaaaaaaaaaaaagacaaattaaaaacatttagacattgtttgactttttaccatggaaggtgagagtttatctcctactcttgctccaccccctttggaagcatttcagattttctgtacctccttaggcatatgccatttcaaccatgaagcttcgggcaggtttttacattttttcctttttttttttttgagacggagtctcgctctgttgcccaggctggagtgcagtggcatcatcttggctcactgcaagctccgcctcccgggttcataccattctcctgcctcagcctcccgagtagctgggactacaggcgcccaccaccacacccagctaattttttgtatttttagtagagcggggtttcaccgtgttagccaggatggtcttgatctcctgacctcgtgatctgcctgtctcggcctcccaaagtgaattttttccattattttggacattcattggaccaccagtgggccattctgtctctgagtttcctcttcttgattctcagaagtgtctttgtattatttctgtgataattttcctcctctccagcttccctgttccctctgcatctcttgatagtcagatattgaatctcttgggttgatcctccagttttgttatcgttctgtctcattttccatagattttttttgttttacttcctggtatttttttcaccttgatcttctatccttcgtcatgagttttctgtgtgatctcactttcagttttcgaaagcattcccctaacttcgcttttgcattccgtgttttctctgccctcctctcccaccctccctactgcccacccctggtgttttgatttattttctataggctttcttcaaaaacctggtgatcattggctgtgtgctcatatattttcatttctttttgtgtaaaatatgtgtaacataatatttatcatttgactcttttaaatgtacaattcagttgcactaaatagattcataatgttttgcagccatccgcaccattcatttctagaactttttcatctgaaaccctatctattaaacaaaaattcttcattgctgcctgcctccagaccctagtaaccaccattctgttttctgtctctatgattttgcctgttctaggtacctcatgcaagtgaaattgtgcagtatttgtgtttttgtgtttggcgtatttcccttagcatgtcttcagggttcatccatgttgtagaatgtgccagaatcttctccctttggaaggctgagtaatatgcgattgcatgtatatgccacattttgtttatcccaccatctgttcatgggcatttgtgttgcttccaccttttggctactgtgaataacgctgctgtgaacatcgacatacaggtatctgtttcagtctccgctttccattcttgggggtatattcctaaatatggaattactgggtcgtatggtaattctgtgtttgactttttgaggaaaaaccgtgctattttccatagcagagccaccatttgacattcctgccagcaatgcacaagggtttcactttctccacgtccttgccaacacttgtgatttttcaggttttgtttgttttataatagccatcctaatgggtatgaagtggtaccttatcatagttttgatttctgtttcccttataaatggtgatgctgtctgtctgcacgtgttttaaagcttatacacaagaaacctgactgctagggctgtgtgtggagtggggccactgtggttgatgacggattgcctgcctggagaatggtcagccaggacccactattgtattaagggatccctagatgtcagtgtctatgggtctttcttgtcagctgttcagctttcttttcataaaaagaactttctagtttcctgccaagggctataaatttggttcaactgttttggaagctgtgtggaggcagtgggccagtgattgtacctttcagcttatatagaatttcacttaaaaccctgttttgggaggatgcctaacctatccacatgtgtgcctgtgtgcccagtgtgcctgggctcaggactactctggtttaatttctgtaaaagataagcatttttttttctggctgtggaagtttcagttgtctggccgcatgggatgtgaggattcttgaaggctgaatgttcctcaagtggatgtggaagctgtgctgtcttcctccttccctgtacctcacaggtgccttgtgctgccatttgttccaccttcccagcacactgttgagggcatcagcttgcattttaggtgctcccccttgcaagctgttggttactgttttctgtgctgttacgtatttcaagttaagactaacatacactctgctgtcatgtcttctttcattgtctttgtcttgacaacgttgaagtttcaagaggaggccaggtgcggtggctcacgcctgtaatcccagcactttgggaggccgaggtgggtggatcacctgaggtcaggagtttgagaccagcctgaccgacatggcaaaaccctgtctctactaaaaatacaaaattagccaggtgtgatggtggccatctgtaatcccagctacttgggaggctgaggcaggagaattgcttgaacatgccaggcggaggttgcagtgagccgagatcacaccattgcactccagcctgggcaacaagggtgaaatttcatctcaaaaaaaaaaatttcaggagggagtggagataaatgaatatatagttgattcttcacattttcttcaatgtgatagctcacagccatcatattgtttcctttcttgtaattatttgttgtcttccctctcctacatatgcgctctggccacaaatgattgcatgtatacagtgcaatatttactcttgttttatttgctgtgagcagacactcttagaagttttctctggtggaagtgactcgggccaactgaaatgccagccattgtcttgatccctggcttctgtttcttctccttgtaactattgttccttgtaactgttgttctttacaataactcgtaaagtatcttatttatagtaaactccaggattaattgttttgaggtttaaaataataatacagaatttcaagtctttaaaagtttaatgtgaatccctataggactttaggtatggttcttcttgaaggcagattctttccaggtttgggttagcttaacagaaacttttaaattgaataaattttctctgttctctcttacagtcggatgcctcctccctgtagtgattcctgtgactttgatgaccccaggctgttgaagaacattgaggatcgccatgtaagtgctctgttttacttcgaagacagcaaacagcttacggtgcaactttcttttatatatgcatgtagtattttgcaagttgcagttttagagcatgggaaaagtctcgacttgatgatgtgagtccttctgagaagtgatcttagacaaatgctttgtggtgaacgctatgcataaattagtgtatttaaatacttggtgattttgtaaagtagcacaccaagatcaagacgagttttaccacataattctgtaacagttccaatggctgttgctttgtaaaatttctgcagtactattttgtcacagttgtgaatctaagaggccaagtgtaattgcatatcctttgactaggatactttaggaaacaaaagtaagatatatataataacaggtggcatttattgcattctactgtgtgccaggcaactaacatatatttctttcaacactttagtcaacatttgaatcacatctgggaggtgacaaggaagttaaataaaagattaaattggcgagtagttacccagcgcataaatgtagaaatgagccttaaacctcagtctgttagatttttaactacgacatcacaccacttcaaatcagtattaactgcagaatcacatcaattcactgttattttatttgttatttatttatttttaatttttctataagggaaaaattgtattgaggaacaggtggtatttggttacatgagtaagttctttagtggtgatgtgtgagattttgtgagattgtggtgcacccgtcacctgagcagtatacactgcaccatatttgtagtattttatcccttgcctccctcccacccttcccccaaagtccccaaagtccgttgtatcattcttatgcctttgcgtcctcatagtttagctcccacatttcagtgagaacacatgatgtttggttttccattcctgagttacttcacttagaataatagtctccaatctcatccaggtcactgcaaatgctgttaattcattcatttttatggccacgtggtattccatcatctctctctttatatgtatgtatatgtgtatatattatatatgtatatattacagtttctttatccactcattgattgatgggcatttgggttggttccacaattcacagttgtgaattgtactgctataaacatgtgtgtgcaagtattttttcctctgggtagatacctagtagtgggattgctggatcaaatggtagttctacttttagttctgtaaagaatctctgcactgttttccatagtggctgttctagtttacactcccaccagcagtgcagaagtgtttcctgatcaccgcatccatgccaacatctactgtttttgattttttggttatggccattcttgcaggagtaaggtggtattgcgttgtggttttgattcacatttccttgatcatcagtgatgttgagcattttgtcatatgtttgttggccatttgtatatcttcttttaagaattgtctattcattttcttagcccactttttgatgagattgtttgtttttttcttactgatttgtttgagtttgttgtagtttctggatattagtcctttgtcagatgcatagattgtgaagattttctcccactctgtgggttgtctgtttactctgctgactgttccttttgctgtgcaaaagctctttagtttaattaggtcccagctgtttatctttgtttttatcacatttttttttattgcatttgcttttgggttcttggtcatgaaatccttgcctaagccaatgtctagaagggtaattcactgttattttaaaggctactctgaaaaatgccaacttagaaaattattcaatgatcaaaacatttcacaactagttaagtcagtataaattagatgtaatatgattaatttttttttctgaaaaaatttctagatttaaaattaggtaaacatgagcaaaattaaaagtttatctttccaaatttccaaaattttaagagacagatatatttaaaactttttctaagttttcatgaggaaatcctacttttctctattgaagttagtgcccatttgttgctagctcttctgaaatgtgagtgtataaggctcgcacacccacaggctgtgatgctgctattccgactcagttcttggtgatgctgatgaagtggtccaagcccacagaggatgctgctggagtctatgttctgtttcagtcacagacagctacagaatcctttcttggattctgatcttagaggtagatccagctactaggctgaagattctccaagcagaaaagtggcgcctctgaagaatcgtctctgcaggaaggtggttttaatcaaagatgtcaaagaaacaagtgtactttgagcactcgagaggaaagaagtgttttcaaatagtattcaggttgagggtaaccacaaaggtgggcaactgaatatgtctgttcaagttaggatggtgaatggaaaaggagaaagtggcagggtgacataggagctccggagactgctcttggtccagtttcacgagcttgctttcctagatcaacgaggagaaagtagcaaaggaaataagatgagcagcgtgtatggaacatcacagaattccagtaatgggctaggaatagcagcaaactattggatccccatttacatcagagactcatttatttattcactcatttcacaatctatttaaggacatcatttatatgaaataccttgctcttggtactaggggaagagacgaataaaaaacactcaaaggattcctgttcactggggaagcagacatgtgaaattcttagaagccagtgtatgcttttgcaggacaggtaaggtgcaactccctgaggaggtgattttggtttgtgtagacagagaggaatcccattctctttggtgactgtcatggctaccataactgttgacatgtgagcagtgtatttgcactgacataaaggtgggatgccatagaaacccagtggcctggggcaaatccttacttggagaagagcttctctggggaccccctacatgctactgggattctagtgtttgaaagatttcaaagcttggttcagttcatttctgactctcacaggtgttctttccaaagctggcccgggactggtgttttgggtccctgtgacgttttggggttttgactgttcatcccacactcttcttgagcctgtcctctgttgatgtttgaatggagatctgagcacagctaatacctctcccattgccttcccctacccactgctttttcctgactcctccttggtggccatggtgagtggaaagaactttaggaagaaatcccactgtttatataagttagtgatctttcttcttctttcctttcctcctcatcgtctgccctcctgagccaaatttctttttagtttagtgggaaagccattgagagtagggacaggtgcaacccctgtgaaaaggaagccctgctgtggggacattgtgatgaccatccaaacacagagacttcaagggcattttaatctggatactcatagtttcagtacaagcataatgaggaattgatcgattggtttgggaatttattttctaatttttagtaaaagcctcctagcctatgtgtaccatttttaagctttcttggatccttgaggccttctgaggtactcttcatcttagctactatgttaactaaactctttgacatttaacatctagctgcactacaataatgaagaccatagaataggctccaatatttttctttggggagatgtgggattgaattaaatgtacccattggaggtttttaagcagtttaaacacagggcctattagattacttgttcattttgccaaaatgtgtctgtggagagggaagaagtatttgaggatttgcggctgcacatgccccacattctcatctaaattgtcttgggactattgactaaaattaaaacatttggtccaagaaaacccttactttcctcccaagggaatacttccatttgctacagaattttctttttttcctatgtcatcatttcaaattttctggttgctttaggactgtgttaagctttgtgtgggctgatagccaagatggaatttggctcttagagaatcaacctatgagaaatttcggaggacaatttatgcaaccccctgcttacattgctaaccagtgtgtgggataaattttcaaaggttcaccaaggaagaagatataactttcttttgaatcattatgcctaagatttctgagcttgagtcttcaagaagaaatcacttatatacgtatatgatttggataatttgtagctgcaattttgcttgcaaaacaattttaaacatgtatcattttctgctattttaaattcaccgaataagtagaaaatattcatttctagatatatggcattttgtacatattataagctgttaactgaaggaaaaatatagtatcatcctgtttctatgaggtacatacaataggcaaattcatagatacagaaaacaaaatagaggttactgggggatagagagaagagagaatggagagttattgtttaatgggtatagagtttctgctggggaagatgaagttttgtgtatagatagtggtgatggctgtgtagcattgttgaatgtatttaaaatgccactgaattttatacttacaaatggttaaatgatagatattacgtgtatagtttaccacaatacaaatttttaacatctaagaagatacacacatacatatatacacacatgaatataagcatccataggcttcagattaattttgtctcttctccctaatttattatagaatgcaataggaagaaaaccaatgataggttaattttattttaggatttaaaaaaaatcttcatggattttgtctggcttaccatttgaggtagaaggctttatttgtgtgtgcaattctttataactcttagaaaatatctcactactaggtttacttatttgtaaaatctaagacactttttatgttgtttcattacgggacaaggttatgttcaggattggaaaattctcaggtacaggggaaggcaatcttgaattgaagctaaattctcacataaagtacttttggggaaaatttcttaccatttttgcaatgcaggccttgaggaatgtgtaaattccctaagctcatgactttactgaactataatttaaggtgccttttctcttcatgataagaagtagccatgtaaatagctgtgatttgcttccataaaattctgcttaagtcacattcacaagacagagaagaaactaaaaatattcttgtggaagccgtcattcatttatgactaaaaaaacagaaaactccatcaaaagaggaaacacatagctgcttccttcacatgaagatataaatctatctcaattttatagccagttgcctatttaaaagggatgcactagaacactgacattaaaataaccccaggacaaggaagcttgcttatcacccctgccttgaatgtaattctgaaagtgctagctcctgcagacaggtgaacattgaaagtttatatattgggaggaaaagggaaaacttctcatttgtgggtgatataattgtctactttgaaaacctaggatagtcaactgcaattcagagaactagtaggagctcagtgacaattggatattaacttacaaaaatcaatgtttctacttacatcccaacaagaaactactgtaaaatgtaatggaaataagattccattcataatataaaaggcaatagataaaatgccttacacagtacttcatgtatagtggtcactgaaataatttttgagcaaataaaataattaatagacgtgccaggtcttatatttagaatatttagaagcttttaatacataggaagacacacttttcttagatgggaagacagcattattttcccactagttatgaatgtgctctaatcccaataaaaaattatatatttttttcccagagagaataagagaattttattaaatacatatccagggcaattctggttttcgttgctgttcaatattaatgagcaagggatgcactgctttacaggtgttgagagattataaacttaaagaatagacactgtatagaacagatgtcggggtggggaatgggagcctggagatgggagcatcttctgtttatggggcctgaggtacagcagtgagggaggcagaacacacgcttccggaggatcttgcgagagtgaggcagcagcacgtgggtgaagcagaagcacagggaggcggaagcagaggggcaagtggaagcacgtggtgaagtgcaagcatgtggggaggcggaagcacgtgggcaaatggaagcatgtgggcaaggccgaggctcctggggaggcagggtgtgtggaggtacaggaaggctctttcgtcttttctctccccatctcttgagctaaagcgcaggagctgcattccaagagaaacctggggattagtgcgcgtcaggagaaccggcttggggactccagaccagagcggtaggagggggatctgaggtccatattaaggacctctaccctgtcctacagggagcaataggatgactggatgttagttggggatctgcttgtgtgagccctggtgcctgttgaaggtgttgtatctgacactaatcccgcctcacgtttgcagcccacagccccttgcattcaggagttcctcacccttctggccgtgtgccacacggttgttcctgagaaggatggagataacatcatctaccaggcctcttccccaggtgagggctctggccggatgcgccctgctggccccttctcaggacacctgggtgttgcagttattcttggaggtgttgccatgtagtccgtcccacagactcggctgtctgctgttggcctcaccctgtggccaggctgtggctacaggtgcaaagccgtagagagcccgggatgggctctcctgactctcatgactcttttttaacagcaaagggaggaccccggttatgttgcatctcccagcagaggtgattgggcttgacagagctctgaagaaagaacagagctggcttcttcctcatcctccccacctcatagattttccgcctgctggggaagctgtgcatgggggtactctctacccacttcctgaggcttgggaatcccacagcacaactaaaatactgccttgctcagaggagatgtttggtgggagtcatgggactattaggttcattggagagaacttgatcccaagcgagaatagcaggaatagaaatcattcttgtcctggtgaattagcatatatccaagcctcccatctaacaggagtgctcatttcagaaccctggtggtaggaaaagcaagtgcttctctatcctgagtctttactattatgcagataacaccaggcctccttcagtagagcggattttgttaatttgaaaagtgacactaaacagaattctgtcactaccagtgatatgtcaatgtttcaccaactcccacttgacagatgaagctgctttggtgaaaggagctaaaaagctgggctttgtcttcacagccagaacaccattctcagtcatcatagaagcggtgagtaacatgcgtgtgcacatttcagatcacctgcttttgtgaagattgtgtgtgtgaaatggcatgtctattgtaaatatgatagctaaatttctctttcagtgaaaaattaagacctgtgacaaactggagttaatgtgattatattagcttgttcgagttgttttgcattgcagtattgttttccccttcaagatgcttttccacatgtctttcatacactgatgtgaaattatttgtagcaaagaacttcacgaatctactctttgttctataataattgggaaaataacttagcggcccacttgtctttgagggcaggttccacatctctttgtagcctcagagcctaagagttcttactcaatgaagcctcacagtccactgggcttcagtctcttcagctgggagaggagtcagcgttaagatctctctctctctctctctctctctttttgagacagggtctcactctgttgtccaggctagagtgcagtggtgcaatctcggctcactgcaacctctgcttcccaggttcaagcaattctcctgcctcagcctccggagtagctgggactgactacaggcacgtgccaccacgcctgactaatttttgtatttttagtagagacgaggttttgccatgttggccaggctgatctcaaattcctgacctcaagtggtccacccgccttggcctcccaaagtgctgggacaggcgtgagccactgtgccgggctttgatctcttttatctatatgagggatcccccctgcaactggagtcaaggggtttacatgttttctgattttttctgagtttccttacctacaggccaaagggagaaatttagtgataggaaaataattatatcaaataggaggtcaaatacagacccttggaatgggcaacaggggaaaatgatggttatgactggtgaggcagtggtgtttttcatgatgaccagttagaagggctgttttattgttgtctgcattgatgataagggtctggggctagtccctgccatcccttgcctttccctactcctccatttggggaagacgcagggattatagtttttggctttatggatgcatccttaaatccatagacctttaatgcatttgaaattcacttccaaatggtataataacttcgtatggttcctgacttgggagtactgtagtaagttttttcttttagttatatgcaaaacctataaaatatcttatcttatacaaagtacccatttattggcatcttcagtttcttatggagtacagagatgagatcatgtgatcatgtttacttttactatgcttattttagtcaacaaagggaatttagcttaaggaaatgtaccatcattaaaagtggaatgaagtactgattgaatatagaatttcccgtacagaagcttttttaaaaatgaggtctttttccccccttcagttggaggagaattttaatctgaactataggattttcagttgtgtgggtgccaccgcatgtctctgcattgcaaaaatggaggttgggggttggggagcttggatcataggtgagagagacagaagagaacaggcgcttccacttcactcacaatgccaaataaatgtggaacctagagagcctattggtgttgtcctcctggtgttataatgctgcattgacacctctttgttacctcattaaagttttaaggtcatatttctgggggtcacaaaagactgcctgattagttaggactcgtagataacagtaataaaaagaatcctactcaaccattcatcaaaccaccaattctcaaattataggttttgcatataagtaaaagaaaaaacttactgcagtactaccaagtcaggaacaaattctcaaattcctacatatttacatgaaatgtcctcgccaatagtcagaacagccacatccatgggctgcatgtggacgtggttgatataactgtgagagagggggtggctcctgggagtggcagccctggtgctgggtggtggtagtagcactgggtgtcttctgaatggggatatgatggaaagttaggacaggctgtggagaaagggaactcggaactcgtggatccagagaagtgaataaagattgatgaaggctggatgaagtggatcattagttgttttgtaggatgcaaagagaaggagtggagagttgtgggtgtgaatgaagataatgattccgtcatatacttggtaatttgaatgtgttacttcattgattacttctctgagccctaagagatgagtgcttttgccatgcataagaaagtcacacacttagaggcagaaactggattcaaactcacatgtattgggtgccaaaggccatgttctttccactgtgaagtgttggggaaatgaaaagattagattaaaaatctgaaaatagcatgcgcaccatctggaatttttagatggaaaaaattgtgaatattgacattctaacttgaaagaacccaaagaaaaagagcgtttgattgattgctctgagaccaggtacagattcaccatctcttatctgcaaattcgaaacccaaatgcctttgaattccaaaagatttttcctaaatttggtgaagagttatttggcagcaaaacctaatcagaactgacatgaagctgtttatgatctttatgaatctcatttcctgatatgcatacattttgctgtagaaagcggatgtgttgtgtaccagcatgttaccccagaccctgctggggacattatgatagatggtctagaatatgtctatataatttgtaaaatcctgaattcagaagcataactgggccaaaggtttctgacggacctgtgcagctggtgtcctctatctccatctcttggaagtgcctgcactccccaactgttagcactgaagaaacgtgagaagcttccaccagaagagggagctctgaccccaccagacttgtgagaaaacagtacatgttgcaaagggctagaaggtgggaagagagagagagagcatatatatgtctgtttatgcttgggagacaattgctttgagattttaatactttgcacctcggttaagagcctatttttcttcctttagatgggacaggaacaaacattcggaatccttaatgtcctggaattttctaggtatgtttctctttcatacgtttgaaataaaataattatatttatttaccagcttcatcagagtgtttacatgattgtatggtatgattcaatatattacttaagtattaaatataataaatgtatctccataaactcttttcttcttggaatttgtgactttcattaaagaaagtgaagtaggttatttttctttgttttattcaagagaaatgctctacttccatgtcctcctttttctttagatttccagagcctgatgttcttgcatcagcagctgcagacatgtctgaatagtttggagcatgtgatgggggcattattttcattggcgtttcccaagtcccatgaggtcattcctcttgctccatttgagcactcctctggagatctgagaaactgacaaatgatgacagatgagatcagttcatcccattagaggctgggtccacgtagggaagttttcctggacttattcggaagcattcttccccagtacaattttaaaaagttagacccaggaatatttgttggacttttttgttcacatagaacattcatagttggttataaggaaacatatcttaattttttgtttctttgcctctttttaacatggaattgtcagtactaaagcaaagttctgttgctatctcaaaggcatcttttcctattattaaaattaggtggatttttgaataacctttgttaaacagtgttataaagctctgtctgctttataaactatttttaataaggattagttttttatctttgtgtaggaaatactttccagccctagtctttagttttaggtttgcaggcatcgacttggaaccatggggaggggaggagggatggctgattacggtggtggctcatgtaggaagtggtgacagtgtccctgcgtgtggaggtgagcgacgtgctaggcatctctccaaactgtgtgcttcatcttttattggaaactgtgcagtgccctgtgattacattaactgggaccagcagttattggacaggcaaggaggaggagaaaagggagttagataaaaacaggtgaatattggtagagacacaaggatgtattaaaatgtatatatgggagaataagaaagaacagaaagataatttgtggttacagtggtgagtctatttctttttcatggactcatctctttcccagtgccacttaatcttgataatactcccgcgaagtacttgctttacacattgagaaactgaaacacgggtttcaagaactgctaggagtgcccacctctaagatagttgagagagaatgcaaatccaggtcagctagagcactataggttaggatgtgggaatttacccagagctgaagagagactctccccgactcttagagacttatagtccattgggaaccaccacactgaaaggccacagagatgggtggtctagggccctctgtagttggagtgtgcttcaggaggatgaaatgttggcaaaggaggatcagaatgtgtagaagaggagaatggtgagtcccgtgtgtgctcgaagcctggtggtggttcatgggagggttggtgggagatgaggtgaggctgcacaggtggacggagagcagtaagaagaattcataggcggtggagactcactgagggctcggtgagtgaggatgggccatgaggaaagacgtgtgaggaagtgtagatgctgcggtgaggggagagagagttccttggtgctaaattgggagtgttctgcgggtttgtgatttctttctactccaattaaaagatgacacagggaggagcttctgagttaagtggatctatactgagtctcccactttcctacctactgggcaagttacttgatagcttagaggtggaaaataaagaatatttttagagagtagagtcagaagtcaatcagatgtggactgtcagtgctggaattctccttttctgtttttcctactgcaaatagcggtcctagtctattttcatggcagggaaagaaataggcttatgttcattagatgtaaataaaaagagtaggagatacacagttaggtcctactttgaagaaaaaggcagggaaagatagaccttgttcatttttaggaaccccagacccccttttgttttgattggtgttcagctgtgggatatgcatcctgtaaacagaccaatgatgactttttttttttcactctcccagtgacagaaaaagaatgtctgtaattgttcgaactccttcaggacgacttcggctttactgtaaaggggctgtaagtaccggagaagcgttgtgcgtagcggagttcttggcagctttgttaatctgccgcttttcctaactgctttcctcatcattccctgattgtttgtccagagttgaaagactgtttcaggtaggctgtgaagttgacttagtagtaaaagcccactgaagataatggtggttcagggcagtgtggcaaagatggtcagtgaaaagcttactgaaatcgttggtttcagaaacagtgactccacgtgtcatgcaaaatccttgaatgggaattcttattccagttttaccagcattgtgttttgactttgggaagacaaagtaatttgtgttgacctatgataatcttgagtattctgatatatattggttctctagcacctcttcttctcaattgttatgtttttttctcatacattatagagagacgtgttttaggtacaaaggcaatgtccatgtgtagctgcattattactgccccttttagtcagtttcctaggtcaggctttttgtcctgtataccttctagtaaccaaatctaaatggtttatctcaaaggaaagatgttattgcttatgagtcttacttatagaactagatcctgttaaattttagtcttatgtatcgagggaaagaattattaaacttattttatttgactatgtcaagaatacagagctctcctaggattaattagtggttgacagtattactaatctttaccagttgtggcaagaagggtggttttatttgagtacacgatgagtagagctttttacaaatgaaggaatgcatgggaattctaaaggcattatatttggactcgctaaagaattctgtgtttatggtaaaatgacttcaattaagctcatctaggttttgttctcatatgatatatttttgaaactttttgtttattcatttgccattgtgttctaagtaccacatcgagtacaacaggtgtcagtgtgaggtggtagagagaggagggctgtcagtatagaagaggtacatacgaaaatgttgcaaaggtgtgttgtatttttataggatttaattctctccaaaaccaaactcagtttaaaaaaatttttgtaatagcctaaaactatgcaatttgtaacacatttgatggattatctgtgggatctggtcccccaacccttcttgtcagtcatggaaatagtcataggcagatgggctgtgcacctgtgtgtttcttggcagaactgagttcagcgcccaatgggttgtgccctctgtgcttaggagctcctcccgtattgggaggcaggattgtacttgagtaatttgggatgtgcattttaccctttctccttctgcgcaaacgcctgataaactttgggatatgagttttgcaaattttggtgaatataggcccccatgtattccaatgattctcctgtatttctggttctccccagcatatttttgtttggcttttaagataacagattttggttttgttggacacattcatacccaatttgttttccaaagctcatgcctgagcccagccaaatgctaaattcctacttacccactcgggtattctcatgcatgttagataaacagaaacaaagccatgcttagtatgctggctggaaggtttactgaaggctttgccagtcacaatgtttccctattttataggataatgtgatttttgagagactttcaaaagactcaaaatatatggaggaaacattatgccatctggaatactttgccacggaaggtaagtggaatttggaaatgctgtttttggccattggagctgtactttcaagcatgttgtcttgatttccaggggcacattcttccagtgcctgccccatcccctcctgtgcccatggcagtgacaagatgcatagccaaatccaaactcatttacctgtagatgcctctgtcactcatcagcagtggtgcagagggagagacaggccaacgcacaacgtgtagaatcacctttagttactagtccctttctcagaaaactcatatggttattttcctgtccctctcttggtgtccttatgtcactggcttatccatgacttaaggaaataataattcatggaacccatagtgagcaggaaaggagttctctggaaggctataaacaacactgatgtcaggtgttcctgatagcgaatgtcatgatagctggagccacactcaagtgctaactgctgctttctggcctctggctctgcgtgcatgcacatatgagcacatgctcacacacacgcatgggtgtggctgcctgaaagcctggatctttcatgggatagcacgtggggcctttccttgctgtcttgaaacacacttcccacctcctctgcttgctgaaacctgtttactgcacatggatcatgcacagctcccgaacctctctgccatggagaattcactcttctgacttctcgcgcactctcagccttacggaagaggtagtttatgttagaatacaggagagctgtttttaaaggtcccttggtagatgtgggagtgttgaattagagtgacctaaagcacagagtctcttcaatttttttgggcatgctgatggaaaagggagcacaggctgtcccctaggaggtcacgcgttctgcctgcctccattcaccagtggctgtcttgcaggcttgcggactctctgtgtggcttatgctgatctctctgagaatgagtatgaggagtggctgaaagtctatcaggaagccagcaccatattgaaggacagagctcaacggttggaagagtgttacgagatcattgagaaggtaaccgcacacaatacagtcttttcagctccatgaaggacttaaccacctatttcacaaagtatttgaacaggaatccttttactatgtagggatgttctcttttcttgtgtcttaatgaaccgttagctctgaatcattttctttgctttaagaagcacttaattttcatggtctttctgaaagctctagccaccctcagctaaacattaatgatagcttaagaaatatcaggtcaaaaacagcatcagcgactttctgggtttgcttaagattaggcttaatgagattaactcacgctgttgagttacaggagcaatcagaatgctgtggaggctggttagatgttgtacatgctaagctttctcgcactaacttattctaatgatatttaaactttgccgttgctactccacattgcctactttgattttgttgttgttgttattcttttcagtttatcctaaggctttagctcactttcaatttattggtttccttcaagtgtgggagctgggtttcagctttttctgtctcatgttggcagccatagggccatccaatttccagtttctataacttttttttttaaatatagagacagggtttccctctgttacccaggacccaggctagaatgtaatggtgcagccataggtcactgcagcctcaaactcctgggttcaagctaacctcctacttcagccttctgaatagctgggactacagtctcatgctaccatgactggctaagtttcatattttttgtagagattgggtcttgctatgtttcccaggctggtctcaaactcctgggctcaagcagtcctcatgccttggcttcccaaatcccaaagtactgggattacaggtgtgagccaccatgtctggcccagtttccataactttgaaaccatcacttatttactgttttcattcctttgttggtttaaaaaaattctcctctgcttttttttactcagtttttttgtttaagttttatattcagttatttatattcagtcattttaatgtactgaattaaaatgaactgaataaatctgaattcaggtgtttatttgccctgttttactggaaatagccaaaattatttttagaattagaaaaaggtgattaaataggtgatgtgcctgtggtggatgctcaagagttggatcttcccacagtctgtgaccaagtagaggtgctatgtcctggagagacttgggatgtgagtacatggagcaggccgtttgtacagtctctggaatttgcccgaccagcaggcacagtgcgggcagctggagggaaccaaacatccacacccatcctcagcatgagctgatctgccctgggcctttaagaggaccaaaaggggcaacattttatagctaccctcaatcttaagatacttggattttttttctctcactgttaaatccttagcaccacaggtctcttactcctattttgccaggtaagtgtattatctagaattagttctcctcctttgttaaatgtgacataatatgctactcattagtggactgagaggaagggctcaggtactgtcagtgtcctcgggataacctgcccatctgctctgctgccagatggcttctattctaacaagcccctgtatcaagaaatcagtgatgagtactgggctgcctgtgtgtgtagagtgagtccaccattgcaaggcatttggaaatgccatccatccagatgccatctgtagacacaagtataaaatagaggaaatagaacaactgtctcagaaccgtttgattgcctttctttgtcagaatttgttagtgctgttcttaagtatgtgccaatctttaactgaggatattttttcaatgtagaatttgctgctacttggagccacagccatagaagatcgccttcaagcaggagttccagaaaccatcgcaacactgttgaaggcagaaattaaaatatgggtgttgacaggagacaaacaagaaactgcgattaatataggtaattatttttacaaataatttcctgatgctgggttttgtatttgtttttcaagtatcttttaaatgtgtctaaatgtttctcaaattcattgacagatgatgttttataggaatcttcattcacaaggctaaggaaaattgacctaaatcaaatgaagatgcctccatgcctgttacaaacattaaaactatcatagttcctggaaaagaattagacacacttacatagggcatagaattcaagatttgacagctttgattttcttattgctttcttcacaaaattttagtctgagactaagagagcatgtttttactaggtttaaatatgcgttattattttatgtaattataaccattttaatggttttgcccattaatgggcttttctaagagccttgcatctttcccttcccagcttgttgacaacttccttgactgcagagcatcacagagatgaaaattgaagaaaaggaatttaagtcaggataactctgccgttgttaaaggagcacgttttaagtttgaaaaggagttgaagctactcattttttaaaaatctaatcttgattatttgaaacatttaaacactatctggtactttgatcagcattatggtgtaacaagacctggtgcatatgtggtaaaatgaacactgcataacttagaatagcttgctagaagtagactctatttctatatctgtttctatgtcagtgctctgtgttttaggaagaaacctgctagagcctttgtatttaagtgactatagtcctcttcagagtagtcttcttggaatattctcaacataatccaatggtgtccctttcctgaaaaccttatctttgaatcagctttgtctctcatgtaacctcagttgtaaataatacctgccttcttggataaatttgatttaaaaaaatagacaaaagccatgtaatcatttcttgtcagggatatagctaattaaatggaagttgggctcccaaacaacggaagttaagctcacaagagagtaacataggattcataaacagtccctgaagaatcagccatagactttgtccctggatttgtgctggttgtcattcagatgcatggttttggagaacagtatgatggtattttagtgcagaatcatcactgctactagaaaatacaaacccaagcttacagccctttgatgatgtgtcagtagcatttttacaaatgaagaataacacatttgctttttgtatgctatatttctgtataagtatatacattgaccctttatgtgttatttttcatataagtttggcctaaaacacctgctatggatctgtggcccctgttgtttgcatgctaagttgactgttaccctgaaatacttacctaaaatttaggtgatatgctttccaccctattagagcaatgtgaaaaaagtggataacccctcaagttaaaattgagctgtaaagtggtaacctttcttagttttccagatcttgagcgttcccgctggcctaataacctatgcgtgtcactggccctagactgaactaccttcagtgtgttcttggatgtgccctggctggaaaagcaccacagctccctctcactgcctctcatccacaccgcccggcccctgggagcacacgcagccctttttcgtgtgtgttcattttattatacctgagcctatctagctaagtttgggataaacacaagagaaagcaaagtgctgaaaatcaacccagaaaacacaaatggattattactcaaaaacgaaagttttacttgtatgtgatgaggctgctctgagccttatgagataattgatacctgtccaaacaattttttaaaaataacgattgtattattttgtactttttttctaagtgggtgtagtaacgtgtagtgctcatgccagaaccgctcacatcatttgctatctcttaattgatctttcttagcaagtactctccaagaccgctagaagatgatgctttataagctgaggactttttgtcaaagtcttatgtttatcctggaggctttctctattcacattttatctagtgtatcagtcagattcaaacacatcttgggtgttactaagtaagcttctaacagctagacaattgatttctttgagagagctatgtctgaattgtttcttcacttcacctttggaactgaagcttgtagccttgggtgacgccgagaatttaaatgtcgtcttgtgatttaaagtatctgtcaagcctacaaatgatgcagaaggctcaggaaagcatatacgtccggacattttattagacttttcagtgtgggaccacaggcggcagctgtcagcagcatgaggtcatgctctagatacagagtgggtttctaagcctgttttctagtcatatagccctcatacccctggtagtatgaaccattatggacctgtctcccataatactttacattttcatgcatcctgtgtggattttaaggtatccagaagatatttgggaagatcaagtatctagcagttctccttctagatgaaaaaagggaagcagagcaagtaaatggagtgtctggcaagtgccaggcactatactaggagtgttttctgaaaactctttttttaatatttacatatgaacattcttatagctcgaggaggaaattctacatttcccagggctataccctacttaatgaccaaactggtactaggtctcagggctcttgacttctggtgtggggcttatttagagggattcacatagcttttgcaaaaaatgctttctgaaatttgatttagaagaccacggagaatggtactacatttcatccattccaaggtgcacattgtttttacattttaatgtctctgaaatggggatgtcgtatagttgttgactcttagcttttaattgtcagcattatcttagtggtatgtaccataagagttcatctttagatttggtgacattaattatctttggtgtttggaggtgttggctctttttagagtttggttttttaaaatatatatatctatctcgtagtttgagaatttatttttaaagtttaactttttattcataccttagaaaaaaaacacacagtcaaatcaagttccaagacatgtgtgtctcctgtgagccagtgaattgtatgtagatagacaatcatcttgtgtataggttttagtagtttgaaattggcatgttgccagaatcctgcaacactgtgcttgaatttatgctaactagctgtgttttgaggagttggcgattttctcttttagcttaaaaatttggcatcagctggtctaaagtgaaatttcagatgtagcccttgtgaatttcgtagtggtcatttccttattaccactgaataaaacgtctattaaatagttatgcaatagatgtggagttttcgcagtctgtaattttttttaatggatgtaggatgagtgagaacaaaatcctagtgtgtattccattttaaagtaattaagttggcattagctttcctcttaaaccatttctgaattgaaatttaaagtctttcccccaccctccctgcattttgttacccatcatttgatacttttaaaaccatttcttatggtcttagaggtttattttttaaattttaatacattttattgtgtataaggtaaacaatatgatgttatgagatacatatagattatctttgaagtttaattttaggaagtgactcaatatgtcacttgcccctcctgtaattgcctgtacattttcttgttcattaaaaggaaggcgagttgccattctcaggtgaagctgggctgtgagggtgacaacactggtgatgttctcaatcttactgctgtttttcacagaagattcagtcctgtatttcttgattacctgcagctaacattgccaggtgctccactataagcttgggcaacttacattccacacttggggcatgagttaattatgagacaaatcagagaatgaaacagatgaggaagtaccaattgtgcagtgtagatgttaattatgactggcttttgtaatagttactagcaaatgttatctattatgtgcccgatactgcactaagtcctttacagatgttttatatttaattcccttggagaatttaaaaggcattatccccttttaaagataaaactgaggcacagagagatgaagtaacttagtctaggtcatacagatgtgagaaagctgaaaatctgagcacttaaccacaacacacagtgttcatttctcagaaggaacaatatgagttgtaaaggaccagggaagtcttcctggatgagaggagtttaaaacttgagccttcagagtttgtttaaaacaaaaatgactgagaatagaatgggtcaggatgtcccaacgtggggagaagccgtgaggtgaggttgagggagcatgttcttctgtgtggcgagggttcctgagaagggcctgaagggtctcaagggagaggtgcccaggcgtgtgctccagggacaaggcctcagctccctggttctctggatgatgaggggctctggacgggctgtctttgatcccacctgggatagcttaaaagaccgtcttttgtcatgcattcttgttgtctgccagtgtttttcatacaggcaaacactgactgaccagattctctgtaaagctattgagaaccagtaacatgctcactgcgggttggtaccatgttgaatcctgtgatgggtagcttggtggatgtgatctcaggatatatggtgtggaaggatacattgttcctgactttttcaaaaatgtctccagagaaatctggatttgatatcaaaaccagtgttctccttttttaaggaggaaacaggttgagagagctgacagatttggtttagtaatattttctagtgtgaagcattatcttgtattaaaatcaagtcctgccgtaagtaccatagactatataatattttggtttctttgaatgttgattatactcaggtagtagaaagactaaacccttttgtagtatactgttaatttcaactatagtaaaaaatgaaatcccagaggttctcctctcagtcattttatggccgtcttgttagattgcgagattaaagaagtagacctcaatttacaagtttggattgacattctatacctggctcttctccaagagttgatctcattttatccaaaaacattagaaatcaagcacaccaaatgtggattgacacaataaataatttgctacattagttaagccacaattaactgggttaaacttccctggtctgtctagtgcgagtgctccaactgataattctctaaacaaaatctcacttccgtatccaaactaaaaacagcaacaacaaaacccttaacctgtttcttctcagaagcctttagttttgtatatttaaattcatgaaagtgtcagtagtttttttttctctctccccctgccatggctagaaaaaaaaagactgagtttttccataatatctttgtgtagcttcagttgtcaaatggcattttgcttaaattgaaaaatataaaataaagcagcaagcgagggcttaaaaattacagccagcttctgcagctgttgttgaagtaaaaaactaccagtaaatccttttgcattagttacactaaatttgtaacagtctatattgcatgaagttgctgaaagtctctggggatgaagaaagaataaatctaacatagagggaaatgattaaagttgcaatatccctctttgcaagtgaaaagaaaatgtagatctcccttctggacctaatctaaggacttataggaaggaagaatgcatttgtaaaattttaatgggaaacaaagagtttgattattctagtcctaccaggcagagcttttaatggcattttgagagggtctcagttttatccatcactgttgttaaaatacagacttgaactagtttgtaaatgtatagaaaattgcttcttgttcccccctcctttttttttgttttagagatgtaacaggtatttgcccatgtggtattgtgatttaaaattattcagtttgttttggctttaaaaacaatatgtgtttgttttaacaagagaaataatctgattcccttgagataactgttgttaacagccttgcctatgtctttttcatattgccttaaaaaattaacatttggatgaaaagccataattttgcgctttaaaatttgatcttggaggtgctttacaaaatgttctacatggcggtccttaggaaggatgtactttctgaaatacacaaacgaaatttttttactgtttccttcaaccccttcattcccccaaaaacccacaacatggtttttcttggtcttaatttttgtctatcttgaatttcattttgtacctgttaggaggatttctcagggatgaaaagggaacctgctagtaggtctgagcacataaatgcagcagttctgctccttgtcccttaggtaaatgccgtcttctttgctagccacgtgtagcatctgtgagaaggatgtcttcttccctgtcctgtgaggagaatccttactcctccccctggctgtaggaacagtactggccaagccctcccttgagattgtcacctgcttagttgaaggctgttgattgatttcccttttctataatccttaatccattatcttaaggtgctgagacaaaactagttgtgggggccaatattctgtggagaaggatttttttcttgccttttctcaatgagagagattgagttgggcgttggtggaaagcacaagtcgtcgctaaccccccaaggcactgagaggatggcaaggtgatctgagagacaggccagtgccctggcggacacctctggtcttggagttgcgagagccctctcctcgccaccgagggtgtggattggaggggaggcatcctgagaggcgctcggcttggtccatgactgctcacccagggcaaagtatgagtaggaaagagcccagggcttcctagaaaatagttctcctgctgggagggaaagagaaaatactatctcgcttaacccatagagataactttactgaaaaatgagaaggaaattgttaagaactaggagtactttcgttccaaataagcctttaaaaaaaaaagcctttttaaaataacaaccaaagaaagatttttttgaaatgtggattactttaaatttttcacaggaaaagtgactccctcagtgtattcctttgaaacctgttgtgagaatcagctgctgtcttaaaggaagggagggagctagctatcccagtgggtgtgtgtgtgctgatttaggggcaccattggggtccactgccttcctgaagtgttcactgttactttagacgatccaaggcttatcttaatgttatacaaggataacagagataaagaaaaatccactaaaaattgggaagtatttattttagcctttagttataaagacattcccaactagttctattcaatctgtacaagaatcaaaatcaacttacttttcctactcctcactgttaccctattcctctgtgtgagccaataggcttaaagtggcagatataaccaaggaggttgaatttaaggagctcacagaaggaaagagaaattcacatgttgtctcttcctccacttcagggtattcctgccgattggtatcgcagaatatggcccttatcctattgaaggaggactctttggatgtaagtagtttttcaaagttgtatttgctttgctataacagtattaaactctttctttctactatcattgataatcagggatcatgttttgctaaaaaacagttatgaaaaaactgtgtttattttctgtttatatttatatttaagaatggatgtcagaaagccttatctttaaacatcaaaacagtaagcttagaatattgcctcatgataatacttttattcatctagaattgtgcatttaaaatgggatagttttaatctgatttagctttaatcattaagtatgaaatattagtggaacctattatgacctacattaaatggtgatggttaatttcactataagttactaaggagacatgtatgattttctttctagcacaaactttagaataaaactaatattcaagtgttaagcattgtttaaatttatatagtgaggccaggtgcagtggctcatgcctgtaatcccagcattttgggaggcggaggcagaaggatcgctttaaccaaggagttccagaccagcctaagcaacacagcaggacctcatctctacaaaaaatggaaaaattggccagccgtggtggcatatgcctgtagtcccagctgcttgggaggctgaggctggagaattgattgagcctgggatgtggatgctacagtgagccgtgatcgtgccactgctttccaagctgggtgacagagtgagactctgtcttgaaataataataatacattcgtatagtaataggatacatgtatacttaattctctgatgtcccaatgctgccgcatgaacccaccccatcatggcataaagccactgaacagaccagcagtgggagctgatttgagggtcaccagcaacctgtgaagtggtttgatatgaaaatatgagctgaacaatgagattccacttgtcagaacttttaacaagggctttgttactggcaggcacccatagcaccctttcaggcagtatatttaatatttatatttagccaatgccaggggcagatggcacggttaattactcttttaaagggaggcaataaagtacagagctttctatacttgcaaattgagagggccataactcctatcgtgaacaccaggatactctctaccccttcatgagaccaagggcaggaggcagggggagagtccgtagttctgtatgtttccaaggcaccactggcaagagaccaccctctggcgtgagtgcttcagaattcatctcggtacacctcctatccttgttcatgttactgcctgcaggcagcccagagtcccaggtcatacctcatctcctggagtctaattctcacatgctctgaggaaatctctcctctacccaagtgtttcagtcttccccctctcacacgtctttatttttctccatggaacctctcatcattggaaatactatgtgtgtgtgtgtgtgtgtgtgtgtgtaaattgttgtgaaatacatcatttaagtgtacagttcagtggcattaagtatattcatattgttgtgtaaccatcaccactatccatccacagaactcttttcatcttcccaaaccaaaattctgtgcccctttgaacaactactctccattcccacacctacctcatcccctggcagtcattctgctttgtgtctctatgaatttcacagctgtaagtacctcgtgtaagttcaatcatatagtatttgtgatttttatgactagctcatttcatgtaacataatgtcttcaaggttcatccatatcggaccatgtgtcagaatttcgctcctttttaaggctgattaatattccattgcatgcctatactacattttgttgattcattaatccatcagtggacagttgagtagcttataacttttttttttttttttttttgagacgaagtctcactctcttgccaggttggagtgctgtgccaaacgaggctcaccgcaacctccaattccttggttcaagtgattcacctgcctcagcctcctgagtagctgggattacaggcatgcgccaccatgcctggctaatttttgtatttttagtagagatggagtttcaccatgttggccaggatggtctcaatccaacttttgactattgtgaatagtgctgctataaatgtggatatacaaatatctttttgagatcctgcttctaatttttggggacatatacccagaagtggagttgctgaatcatatggtaattttacatttcactttttgaggaacagccatactgtttttttacagcagctgcatcgttttatatggtttgtgatttttccatattcttgccaacactggtttttttttttttaatagtagccactctaatgggtttgagagtggtatctcattggagttttgatttgtatttccctaattattagtgacaatggacatctttacatgtgccttttggtcatttgtatatcttctatggagaaatgtctattcaatcctttgcccattttttaatcaggttttttttcagtgttatgacataatttgtattttttctacctccctttagtcccttagactgtaaggtccatggttaaaaacctgtttaaaaaaactgggcatctccaccttcaagaccttgctttgcacatattatgcactcagtaaatgtttgaatgaatgaacaagcttaagataattttctagtcatcaataagaatttctatttaaaagtcatgctgatgagatagtggctacagtagccatgaggggctgagtacaagttgatgttactaagaagtagaaaatgagtaagccaaaacaccgcatcggtggacaggagagcagagtgctcctgcagaaaggctcctagaacccttggatgtgtgcacataccttatgaacacacccacagtgtctgtacttgaggcttcctttttttctgatgattttctggttcaaaggtatctctaaccttgaaaaaagcctcctttttctggaggtaactcagaaatgagcctctgttttccccttatatcagatgttttctggagtccaagagatgaactttaactctacatacacattgagacttctggtttacctagaccaaagagtggtttgtgacgccaaactgagaagggttttatgggtgttttcctgacttgccttggtttaaccttctaagaatgattctttcttaactaattttgaacttcatcttttagtataatgactgtaatttattcagtatctactgagcagaggtgcactttctatgtactgtttttgttcattattcaaaaggacactccatatttctgactagtgtctactgaggaagattctactccttccttgccttctcctccctctcatgctttagttgggttaaaaccattcctattcttattaaaatcgtatttggtggtggggagggggataaaagcagcgtcctagcgcaataaagtagatatacagtagagctttggtggagctcccaggttgagaatttaagtctcagggctccaataacaatgcagatgggacagggacacagaaaatggcccaacaattagaagcatttggcctggcttctctttatttcatctctcatataagtgtgaggggatccacacctggcccctatcagtttcatcagaccagtaagtatggccaggttcggactccaaatgctgtaaacaattaggatttatgtctgtgttttgagtttgtcatatgctgccaaaataacttctaagctccataatatagatgagatcagtggtctttgaacaaggtggagtgatggtgtgcaccccagggggacactagatgatatattaaaatgctggaaaaaaagttgtggtttcctattttttcagttagaaaagtactgagagattagctttattgataatacgtaaggattgccactggcatcctcaattttttttcctggcacactgaccagaaattggtctgagaggaatgggtaggaggagggaggcatggcgtttcaagtgagaaaggttgttactgagactctcactctttgatttgcttttagccaattgtgaaatattgccattcatgtgtattggttaaatggacttgtggactagagttagttttcattaaaatgactctcacagatgctgacttaatagaattcctgttaaaaaaataagtgaattgaggataacaacattgtaagcagaagctgcaataatttgccttgctcaatgtgtgtgctagttccagctcttctcagctacttgatagttaaaacagtgatctgatctgacagacacagcaaatttcaaaattattcacaagattattataattaaccataaactttgtcctaaatgtatatggtatcttgaaatattagctgtggtaacatgaaattgtaggaattaatgagattttaaaaactaagaatcttgagtaagagaataaaaatctacaactttaccagcaatttattttttaaagaatgtagtaatctaatcatttactctaaaatttcacaaaatctactgcaaattcgtgaatgataaatgtctttgatatttgttagtaaaggacaaaaagtgctgagttacttggagagcatttggttttcctgctgcaataatatagagaacgcagtgtagcaataattaagttgaatatgggtggaagacctatacaaaaccttgccaggatttatgtgtgtgtgtgtgtatttaaaaaattttttatttctataggttattagtgaacaggtggtatttggttacatgagtcagttctttagcggtggttcgtgagattttggtgcacccatcacccgagcagtatacactgaacccgatttgtagccttttatcccttcccaccctttcccccaagtccccaaagtccatcgtgtcattcttatgcctttgcatcctcatagcttagctctcacttatgagtgagcacatacgatgtttggttttccattcctgagttacttcacttggaataatagtctccaatctcatccaggtcactgtgggaatgtaaactagtacaaccactatggaaaacagtgtggagtgtccttaaagaactaaaagtagaactaccatttgatccaggaatcccagtactgggtatctacccagaggaaaagaagtcattgtacaaaaaagatacttgcacacacatgtttatagcagcacaattcacagttgcaaaaacctggaaccaacccaaatgcccatcaaacaacgagtagataaagaaactgtggtgtgtgtgtgtgtatatatatatatatatatatatgtatgtatgcgtatatgtatatgtatatatatatataatggaatactactcagccataaaaaggaatgaattaatggcatttgccaaggtttctaagaaacaagtaattaaacaaattgtgaaacataagagatttactacatatttggataaaagtgtagtttctaacgtgtttcaacgtatggaataaaccaaaggttattgttattgagaggccatcaaaagaaagatgtactggcaaagatgtgtttgctcagagcaaagcattaattctttaacacaaaaggttttatgaaataagtatgtacagtcactgatggaatggctactgtggaatgaaaatggaatcagataaaattcattaatgatgcctgcggcagagactacattttccagcctctctgtggatgggtgtggccataagattaaattctcactggtggaatgtgagcagaagtgaggtgcgaccttgtgcattacccattgagaaggaaatctcttgccctggttcctcagcccttcccattttgctggctggaaatggtataaggctggagctactttgggggctatttattggcaacatcagagttgctcccctcgattgggcccctggatgactttgggaaacagaatctgcagattccctctggaatgtttttctgagaaaaggttatatattttgaactgttgcataggtggtagtctctttgtttatcctcaccctactaatcgtacagaacctgatattaaaagtagggtcaatacatggtgctccagcatgacacagtgcagggctgtcctcagagagagaggaggagggtctgatgctgctggccaaggagagctaacaggatttgaaggtcaagggatttggattcattcaaaccaatacatgtgtcctcattcaggttcttaaggtcccactctttcccatcagcgccctaactttcatgaaagagacctggttagtctaggactacaacattcattgaattctacaacccacagaattaactttttaggctgcatatgtcgggctgctatgagagaagaggttctcttagtctgtcatagagactctcttgtcttctgactttgtcttgacctctgattttgcaattttcattctttaagcttcccagtgcagtgagaagtggctgacctatccttaatcttgtattatttctgctctaatggtatatttcagtagctgcttgatctgccacagacttggctttaataggcagttgttacaaattgatcacaggtaatgattttaaatcagctctattgagatacagtttacatacctacaattaaatgtaccaattttaagtgtacatggtgatatattttgacaaatgtatataagcatgtaatcaccaccccatttaaaatattgaacatttacatgatctcaaaaagttccagccctccatatccccaggcaagcacgcggaccttctttctaacacaatggattaattgtgcttgcttagaatttcatatgaagactgtctttttgtctggcttctttcattcaacacaattattttgatattcatccatgttgctgtgtgtatcatctgttcattccttttttcgctgggtatttcattttatggatattccacaatttgtttattcgttcacctgttacaggacattttcattattttcagtttgaggttattatgaataaagctgctgtaagggttttgttctgtgcaagttttggtgaacatctgtttttgtttttcctgggtaaatagctaggagtaaaattcttagattagagggaagatatatgtttagctttataagaaattgccaaacaatttccattttacactcctgctagtattacctgcgagttttcatttttgcgtatcttcaccggtgtttggtactgtcagtcgttttaattttagccattctagtgggtgtgtattattgataatatctcattgtgactttaagttatatttccctgatgactaatcatgttgattttcttgtgcttattggtcatttaaaaatcttcctttgttgaagtctctgtcaaacttttgcccatttaaaaaaacatgttatatgctttttaaaattactgaattctaagagttttctgaatatataatttggatataaaccctgtttcatagatgtctgttgcaaattttttttttaccaatctttgtcttgcctatccattttcttaccagtgttagggaaaatagaccctaggctggcctccaataattcctgcctcctggtgtctacacctttgcctaattccctccccttgagtgtgtgtggaacctttgacttgattttaaccagtagaatatggcaaaggtaatggaatgtcactcccttgcatgatataagagtccatcttagcagattggagtgagagacttttctccattgatggctttaataagtaactggctatgttgtgagaaggcctatggagagggccatgtggcaagaaattgcagacagcctctagtagctgagagtggccaagcctacagccagcaagaaaatggagacctcagtccgacaatcaccaagagatgaatcctgccaacaacctgaggaaggctggaaacaggtacttctccagtcaggccttgaggtgagactccagcttagccaacaccttgattacagcctcatgaggtcctaagcagcagatttagctaagctgtgcatggatttcttatgagaaattgagatgataaatatgtgtggtattctacgttgctaaatttctgttaatatgtttcataactatagaaaagcagtataaacaccttttgaagagccagaagttttttgtttttttttttaattttgttgaagtcaaaatttctttctcattttcttcttcttttgctgtgattagagctttggtgctctctaagagatatgtacttactctaggactgggaagagtgcctcttgtgtttacttccaggagttttgtagttttagcttgtaagtttaagtctgtgatccattattgtgcatggtatgaggtaaggattgaggtccagtttatatcccgtatagttatctagtgtttacagcatcatttgtgaaaaatactactacttcatcattgaaatacctgtgcttttgttggaaacctattgagcatatatgtgactcttcctcgaccctctaatttattgcatttgtgtatgtatccctctttgtgcccaattccacattgtcttcaatatgataactttataacaagtcttgagatcctccaactttattttttttaaagactgttttggtcgtttcaggacctttgcatttctgtatacattttagaatcaggctgtagattcctccagaaagcctattgggatttttatggagattttccgaaaatttatgtgtggatttaatgcaatttgacactttaatgggattgatatttgcattctatgaacgtgggatatctctcatttacttaggtctttaaaattactctcagcagtattttgtagttttcagtgtacaggacttgtgcacgtcaaatttgctttttctgattataatggctccttttgattcttccatttctcttcattgtatttatgcattccttttaatcctttaatattgttatgatagctcatttaaattcctcctctgctaattccacttctttgtcatttatgggtctgtttctatttgcttacttcttttgtttgttataggtcacatttttctgttattttgcatgtctagtaattttttttattgtatgatggttattttgtgattgagtgtctagattctgttgttttcttttaaagaatattgtgttttggcaggcagttacttgtgagtttatagtttactctagaactactgcagctttcctaccaagttataacctgttggtgctgctgcctaagaccccaagtgttccctatggtttttccactgtcagtgctggaacttaagtatcttccaatcatgcatgagccctgggaatttttttttttatcttacagcactgatagttgttcttttttcatatatatgagaaaaaatatatgtatctattttagggttttctttccccaaatttcatgtcatgtccctgtacatgtgcataaattagcatttgcttaaagagccaaggggacccttacagatgcttgagctctttctctgtgcagttccttctctcccatatgctgctttgcagctcctagccacccagcattctctaacattctttgtctcctcatagcagtgagaacatcatcctctgggttcctcttccctgaatcacaatttgggaagtacctctggttagaaagcttcagctgtcatcggctcacctcatgaacttctcttcttctgaggattgtcttcctgtgttgcctgttatccagtgtctgaaaacagtgtgtttcatacactttcccagttttctggctgtttataaatcttgtatactagttactttaccacgcctagaggcaaaatgtaagtaatcactctgcctctgtctttgataaatattaatttccagtttaaagacctgtatcacttgggtttttcttttgtaataatttattgcccctagtgtgtggccagttatctctgattttgagaattccagggaaacttagctggatcaggagaaaagaagaccagaatagtgcatctgtttcacctctgggttccagggacgaggcaggatgatgactgcaatggcaaggaaagccattgaatgatcacttcagtagctattttggtcctacttgccatggacagctaatatcttttttccactgatgattaggtcatcagtgccttcaaacccaagcaaaagaaataattaatgccagtttttcacctttggaatatttcttagaaccacttctgataccaactataggaacagtcagagttccatgcaggaaatggtgaccgtcaagttctgctcaggagataaaaaccacatctggtctctgaacagagtggtttcaatgttaagaattgttaattaagttatggagtttgctaactaggtaactaagagtacagtaagaaaactctagggcagggattggcaaagtacaaccctcaggagaaatctgacccaacatctcttcctgcaaataaagtttcattgaacacagacatccccaaggctaggttaaagaagtgattgtcaagggaattgcgagcagacaagaagcaaacaagaaggagcacatttctttctttgtctccagctttggagtctctcattctctctctgcccctctcctgctggcagggcctagagccacctgtgagtgaggagtgtggttggtagttcctactccagtagcataggctgaacacagaagggagcctggacagtgagagatgttaacagctggcacagaaatgaatttcaagtgtaaagatttaaaataggaaattaggtgcttgtgaaattattgggaaagtggaaggagcggaaggagcagaagccagcgagccctagagaggcttcaggtccatgccctgcagctttgttcccggagtcagagcactattgctgctacccaggagacctcagggagccactgccaacgtcctggcatccttacacccatgaagccaggtcgagatggtagaatgtggtctcttcatgctctctctcctctctgtcttcccaatcttaagcaaatgcatcttgttgatagaattcatgcagcatcttggtaagaaaggagtctaagaaatatggctttaagccttccagtctctgaaatacagggaagaacatggaagaagacagaaataaataccgaagccagcagataatatctagcaccagctcacctgtaggcaggaagtaggcatcaggaggacacgggatactacaagatcgcacggatgtggtctattccataaaagtcagacctttaacattcagtcgattcttcatggtactttgcagtgacaggtagagtgaccatgaacatctcgtggaccacacagaagttgactattttgtttctgttgttattctcatgacaaagaacagttgtccaggttaaagatgatgaaggatggcataagggtcaagacaacatctggggcgctaacagggtgaaactcctgctttctgtacttagaaaagtctttgccctatggtaaattctcatagtaagtcgtagttaactattttcaacttttcttttagaaaagtccagttttccaatttgatcttttctctgatgacaggtggttcgtggtaagcgatctacacatgtataatatgcataggcataatgtcatcatttgttgctttaagatgaatacgatgttttcatgtgggatatgatgaaggcttttttgggtttagagagaccactttgaaaagatatgtttagaaataattaaattgtttgttttgttttgttttgttgtttgtgttgttttttgagacggagtctcgttctgtcacccatgctggcgccatctcagctcactacaacctctgcctcctgggttcacgtgattctcctgcctcagcctctcaagtaggtgggactacaggcgcgctacaggcatgcaccaccaggcccggctaatttttgtttttagtagagacagggtttcaccatgttggccagttgctgtcgaactgaactcaagtgatccacccaccttggcctcccaaagtgctaggattacaggcgtgagccactgcgcccggccagaaatgcttgtattgttaacgtgattttttattacacaaaatgtgggtcacatattttaaacagaatactaagcagcctctccagtaacaaaagctcatggtccgttgagtgctttttcatgagtgcctagcactttatataaattatctctcttaaccctcttagcaactctgtaaggtcatgaaatattcttttttcaaggttattgctaaaatttttgatagaaactttctatttttttttcctaccatctgctaaaaaattcctgatactcttgcctacttggtaagattactttgtaattaaacttgcttatcaacattttttgtgtgtgtgaaggtagtaagattgtggtatactagaaatgttgcttgaacaatttttttctaatttgtttttaggcatgtccaattaataattcttttaatcctttgaaggcacttgcattttaaggtcagagagacaattataaaacattttttcttagggttctgtagtaagtgttattgaggaatgtcagcaggatgaggaaacagggctggcggggaggggagaagctgctgtgttgtgtaggtggtaaaggaaatgctctctaatgagatgactttggagccgacttgctgggagggaaccatggggctgtctggacaggagatggcacctcccactttgcctggagcagtctcaatttgcacctgttttcctggcatagatttaagactcccctttttactcccaaagtgccttggtttggagggtaaaattgtatgatcaccctgtatctggaggaattgtgcttcaggcagatggtccagcaaatgcagaggcaaaggccgatgctccccactgcatttgagcagtgtgtggctggaggggagagtgaagagggagccagagagacagcatgaactcatcctgtagcagtgtagagcattgttaggagattctgagtgaaatgggtgtcattggaatctgagaagagtgacatgatctgatttaccttttaaaaggatatctgggccaggcacagtggcttatgcctgtaatcccagcactttgggaggcagaggcgggcagatcatgaggtcaggagttcaagaccagcctggccaatatggtgaaatcctgtctcaactaaaaatacaaaaaaattagccaggcatgggggggtgtgcctgtagtcccaactacttgggaggctgaggcaaaagaattgcttgaacatgggaggtgaaggttgccgtgagccgagatcgtgccactgcactccagcctgggcaacagagtgagactccatctctaaataaataaataagtaaaagggtatctgttcttctttgtgtctctgtgtatttgactcctctaggtccctcatgtaatagtcttattgctctttgacttggtaatgaatactctaccattaaaaggagtcttggctaggcacggtggctcacgcctgtaatcccagcagtttgggaggccagagtggttgggtcgcttgagcccaggagttcaagagcagcttgggcaacatggtgaaaccctgtatctacaaaaaatacaaaaaaaatttagccagtgtggtggtgcttgcctgtagtctcagctacttgggaggctgaggtgggaggatggctttagcccaggtggcagaggctgcagtgagtcgagcctgggtgacagaatgagactctgtctcaaaaaaaaaaaaaaaaaaattttaaaaagagtatctggctgctggagtgagcagagactaaagctgaagggaggcaaaggcatggaggcaggagcccacctagtagctggggatgctgatccaggcagaagatgatgggggtgttggagtggaggttgtggtattggtgatgggaggtggtgagattctgggcatatagtattttgatagtaaagctgacagggtttgctgatgtattggatgtgggatagaagaaggttaagacccgaggggtttggatctgagcaattggaaggatcaggttgccatttctgagaagaggaagaccataggaggagcaggtaaggtgggggaataaggaatcttttttgggcattttaaggttgagataactcttagatatccttagggcagttgaatatgtgtgtttgggaaatcaggggaaaggtctattatggagaaaaatactgagtaatagtctgtgtagtgttttcaattctgtgaggctgaatcaggtcaccaggattgataagagatagcaaatctcaagaattcagctcttgtgggtggtggggtggggggtacttcattgtttaaaagtttgagagaggagaggcagcaaaggagatcaagaaaatatggccattgaggtaagtagagaagcaagagagtttgagaaaatatggacattgaggtaagtagagaagcaagagggtttggcattttggaaaccaactggaacaaagtctttcaagaagaagggaaggaactgctgtattaaatgctgctaatgggttcagtgaaatgaggtctgagaaataattattggatttagcagcgtggaggtcatgggtgacttgtcaggagctgtctggggcattatggagatgaatgcttgattggagtgagtgcaaggaattgggtggagaacaactggagaaaacaaaagaagtttacagtgagttttgctgaaacttcttgtaggtcttaggttagcatggtaatggatttccctatcatggtgagcaaattaatgggtaactttatttttccaaaatgtgtagtaaactatgatttttaaagtaattcaaccaataaaatgaatattctttcttttaacatttcctctgtttaattgaaagtggtagatatttgttattaatggtcttgaaataattatttgaatcagtcagaactttaaacttaatgtaccaagctctttataatctaagaatcttatttttgtttatgcttttcacaaaacaaaggtgggtagtattagtattcctgtattctactgtagctacataacaaatcattcccatccaatgggtttgtttttgatagatagtccatgtttgtgaaatctagcttttggaaggggtggaactcaaaagtccttgtccgtcttttgtgctaatggtactcttgaaagccccaactcacagagagagacaggcatgcatcatctgtcagggagcctgacaactcttgacttaccactgttggctttctaagtgaagaaaatcagtaattacatggtgcatcataaaggtatatcatgaaaaatgttgaatgtcaacagcgatgatggttcttaagctgagataacaacctactttgttgtgacaatggagtctcagggtattgtaagagaaaaattattatatgaaaggctaacatctgtcaagttccttcgtcagtgaactttattctgtggtcaaatttctaagcatagttcttcctatataaggtaacttatgtagacctggacatgttttatttggaatgacttccatgatgtgtctaagacagaacctttgatgtagttcacttgattaatgggattatagccatcaagctttgttctgaggataatttaggttttctggcaatctaatagttttaaacctcatttgcccacatttaaaattacccaattcatttaatgttgaaaaatatatattaatgaggaaaaagaaaaatgaaaaatgttctctgggtagacttccattacccagagaactggaataagtagaagtatatagtttatataaatttttggctcttttaattcactaataatacaataaccttgtgtgtatgtagtgtatatacatatatgcctgtgtgtatattggtagccattttttaaaaaatgcaactactcacaatagatattcatgttaacctagttttttctctcgtagctgagattgtatctctagatcaactaatatgtagctgcagctcggttttagagaactatgtagataacattttgtatatttctgtgatttatttaaaccttctcttacttttggacattgaggttgtttctaacctttaatgtctaggaaaagatctcattttgttttctactgtttattttgttagaataaattcctagaaggctcctaggtcaagagaaatatgccttcttgagtggaggtaatctatattcacacacacttaacacacgtatgtacatataaatccatatactccttcttgccctccaagtaaattctgccagtttaattgtaatttatttactagggaatgaaaagagcttaccacagttctgcacgggtaatataaatgttggaaatgtgggtattttctcagtgttgtttgtggaattaaaatcctctgaaatgaggttgcatttaatatgttctaaatttgaggctatcatagcaaaaatgatatcttaatagatggctgcatagctcataacctgaaacactgatgaactttccatttacatagctgtctcctgcctttcctatttgatgtgccataggaggtgaaccatgaaaggtagtagctgttgctgacactgcttctgtttgaatgattattttcttttaaattttccaatcttaattgtacgatttaagaacatgttgaagaagaatgattcattggcaggtaaaaactaaagcctactctataagttggaacatggttattatttcttagagattagctctctactctgctttcaatagggaagttcttgacttattaaattgccagtctccttcatccagctgaatggtctagttcttctacttaaatttaaattataagcctactggaaagtatttttgtccaactgagcatattcatttcgttattcaggtacttttgccccttattaccaggaaattaaatgtaaaaatagtgtgaaacaaaatgattggtatacttaaacacccccagacacccatccacccacacattttctatagagggttaatgagaagtgaaaatgtttttctgtgctatccattgtaatagttgctagtcacatgtggttattaatcacttgaaacataactagtttggttgaggaactatcaattttaagtaatttaaattttaatagccacatgtgactagtggctactgtacaaggcagcagagtgtagataattttcaagggtccccgacccccagggcacgaaacagtactggtccatggcctgttaggaactgggccacacagcaggaggtgagtggcaggcgagctcccatttaccacgtgagctccacctcctgtcagatcagcagtggcattagattctcacaggaatgggaaccctattgtaaactgggcatgtgagggatctaggttacatgctccttatgaaaatttaactaatgcccgatgatctgaggtggaacagtttcatcttgaaaccatcccccacaacctgtgttaaaattatcttccacaaaacgggtccctggtgccaaaacagttggggactgctgccctaggacaagggctggccagctctggcgagtgcgacaaatccagctcaccacttgtttttataaataaagttttattgaaacacagccatgcacactgatgtactgtcaatgatcacttcaatgctacaaaggcagagttgagtacagatgcccctcgactcatattgggtttacttctggataaacccattgtaagttataagttgaaaataacgtttagtactctgataaaccgattgttaagtcaaaaaatcgtaagttaaaccatcaaagtcagtgaccatctgtagttgcaacacaaaccgcatggcccacaaattgtaacatatttactatctggttctttaccaaaagtttagtgaccccctgccctgtgtaatcagatggaaactgactcaattccagttccattgccagctgtagctatatttctgaaacagtgtttttaaaaatgttaacaagcatttttgggagaattggatctatggctaatttgagaagatgcagagttgtaaataatgaagtagattcatctactacactttttacacaatctttaatccccttatttcactataaatcatgcagaggtttattatatagaatattttgttaaccaaatttatttgaccagtgattttcttttttggtaactcttgttataagggacacagacttagaaatgctgctttttaaaaatagtgagttttcctcttaatagatgatagtaaaataagaagcatgtgaaagagaatcctcagagtaggacaaaggagaaacggattgaattagtctattttgtgttgctataaagggaatacctgtgcttgggtaatttataagccaaagaggcttatttggcttatggttctgggactatacaagaagcatggcaccagcatcaacttggcttttggtgaaggcttttgtgctgtgtaaaaacctgtagataaggtcaaagagggaacaggtatgccaagagggcctgaaccccacaatggggagcaaatctccacatgagatttggggtgacaaagcatatccaaaccatagcgtgcatatttaatttctgggtttcattaaagcaacagatatttgagtacttttaataggtctggcagtttgcccaggttgtagacataggattacatgacagtatgttctctactctcaagtttctgtttgtgctgttataaatttgagcagtcatcattaaatctcagctatacatttaagttctgtttgtgacagttgccacaaaggaaacgtctaaggtgctaagtatatatggttaggaaaaatcttgcaaactttttctgtaaaggactagatagtaaatattttaggctttgtgtgccatatgctgtaggtgtcacctattcaattctcctgttgtaattagaaagcagctgcagatgacacataaacacacatcacacagacaaatatgtcagtgtgattatgccatacatacatctatatctatctgcatttgcatacttctcaagcacttttcaaaaatgaccatacaaatcataaagtgttaacagaattttggagaactgattttcatgcagctcatgttctgtgagtgctatgcccttgcccaagaccttcaaaaaggtcatcatacaaatcttatattcttggaaaattaaaaacctatacttacaaatccagtgtcaaagaggaaatcacattggaaattagaaaatacttagaattgaatgattaaaaaatacttttgcatcaaattcatgggatatgaatatcccaaagagggaaatttttgtagccttaccgattagattacaaaataaaaaagacttaaaatgaacaagctatacatacaatttaaaatgttaataaaagagcaagagaagatcaacaaaaccaatagtaagattcttcaaaaaaactaatgagataggcaacaagcaagttgatgaaggaaaaaaagcaaaaagataaaaataaacaattttaggaatgagaaaagagaagtcacaggtagagcagtgagtagaataacataagagtacaatgaagaactaatttgaagcctagatggaatggccaattacctaggaaaaatccattgcattcaaaatcaggcttgaataaatagaaaatgtgaatagatttgcaactattaaaggagtggcctcattacgtacaatttctcttaaagagagaacaccaaatacccatgtgatgcctagagtgtagttttgacaagcattaaaagaataaaggattccaaatatatatatatttgggattcaaatatatatatatatatttggattcaaatatatatatatatttgggttcaaatatatatatatttgaataatgtcttattttcctctgggtagatacccagtagtgggattactggatcaaatggtagatctccttttagttctttaaggaatctccacactgtgttccatagtggttgtactagtttacattctcaccagcagtgtaaaagtgttctcttcactgcatccacaccaacacctattttttttttttttattatggccattcttgcaggagtaaggtggtatcccattgtggttttgatttgcatttctctgatcattagtgatgttgagcattttttcatgtttgttggccatttgtatttcttcttttgagaattgtctatccatgtccttagcccactttttgataggattgtttttttattgctgatttgtttgagttccttgcagattctggatattagtcctttattggatgtatagattgcaaagattttctcccattctgtgggttgtgtgtttactctactaattgtttcttctgctgtgcagaagcttttttgtgtaattaaatcccatctatttatctttgtttttgttgcatttgcttttgggttcttggttacaaagtctttgcctaaggcaatgtctacaggggtttttccaatgttatcttctggaatttttatggtttcaggtcttacatttaagtctttgatccatcttgagttgatttttgtataaggtgacagataaggatctggtttcattcttctacatgtggcttgtcaattatcccagcatcatttgttgcaaagggtgtccatttcccactttatgtttttctttgctttgtcgaggatcagttggctgtaagtatttggctttatttctgggttctgtattctgtttcattggtctatgtgcctatttttatatcagtaccatgctgttttgttgacgatagccttatagtatagtttgaagtcaggtaatgtgatgcctccagatttgttctttttgcttagtcttgctttggctatgtgggctctcttttggttccatgtgaattttaggacttttttttctagtcctgtaaggaatgatggtgcatttttatgggaattgcattgaatttgtagattgctttggcagggtggtcatttccattcgtgggatgtatttccatttgtttgtgttgtttacgatttctttcagcagtgttttgtatttgggatgtatttccatttgtttgtgttgtttataatttcttttagcagtgtttatatttttccttgtagaggtctctcacttccttggttaggtatattcctttttttttttttttttgcagctattgtagaaggggttgagttcttgatttgattctcaccttagtcgctgttggtgtatagaagaactactgatttctgtacattaattttgtatcctgaaactttgctgaaatcatttgtcagttctaggggctttttggatgagtcttaagggttttctaggtatatgatcatatcatcagcaaacagtgacagtttgacttcctctttactgatttggatgccctttatttctttctcttttctgattgctctggctaggacttccagtactatgttgaatagaagtggtgaaagtgggcattcttgtcttgttccagttctcagggggaatgctttcaacttttctccatttggtataatatttttgactgtgggtttgtcatagatgactttacattgaggtatgtcccttgtatgccgattttgctgagggttttaatcataaagggatggtggattttgtcaaagactttttctgcatctatttagatgatcatgtgatttttgtttttaattctgtttatgtggtgtatcacatttattaacttccatatgtaaaatcatccctgcgttcctggtatgaaacccacttgatcaaggtgtgttaactttttgatatgctgttggatttggttagctagcattttgttaaggatgtttgcatctatgttcatcagggatattgttctgtagttttctctttttgttatgtcctttcctcattttggtattagggtgacactggctttatagaatgatttagggagggttctctatcttgtggaattgtgtcaataggattggtaccaatgctttgaatgtctaatagaattcagctgtgaatatatctggtcctgggcttattttttgttggcaatttttaaaattaccattttaatgtcactgcttgttattggtcttttcacggtttctatttattcctggtttaatctaggagggttgtatttttccagtaatttatctatctcctctaagttttccagtttatacatgtaaaggtgttcatagtagccttgaatgatcttttgtatttctgtggtatcagttgtaataactcccgtttcatttctaattgaacttagttggaaattctctcttcttttcttggttagtcttgagaatggtctatcaattttatttatcttttcaaagaaccagcttttcatttcatttatcttttgtatttttttgtttcaattttatttagttatgctctgatcttggttatttctttttttctgctgggtttgggtttggtttgttcttgtttctctggttccttgggttgtgagcttagatggtctatttgtgctctttcagacgttttgatgtaggcatttaatgctatgaactttcctcttagcactgcctttgtcgtatcccagaggttttgataggttgtaccactgttattattcagttcaaataatttttaaatttttctcttgatttcattgttgacccaatgatcattcagtagcaggttatttaatttccttatatttgtttggttttgagggttccttttgaagttgacttcccattttattccagtgtggcctgagagagtacttgatatagtttcagttttcttaaatttactgatacttgttttgtggcctatcatatggtctagcttggagaatgttccaagtgctgatgaatagaatttatatcctgcagttgttgggtagaatgttttgtaaataagtgttaagtccatttgttctggggtatagtttaagtacattgtttctttgttgaatttctgtcttgatgatctgtctaatgctgtcagtggagtattgaagtcgccactattattgtgttgccatctatctcatttcttaggtctagtagtaattgttttataaatttgggagctccagtgttaggtgcatatatatttaggattgtgatattttcctgttggacaatcccttttatcattatataatgttcctctttgtctttttacactgcgattgctttaaagtttgtttggtctgatgtaagaatagctacttctgcatgcttttggtgtctgtttttttctacccctttaccttaagttcatgtgagtccttgcatgttaggggagtctcttaaagacagcagatacttggttggtgaattcttatccattctgccattctgtatattttaggtggagcatatatgccatttacattcaacgttagcattgagatgtaaggtactattctattcatcatgctatttgttacctgaataccttattttattgtgttactgtttgataggtcctatgagattcaggctttaaggaggttctattttgttgtattttgaggatttgttttaagatttagagcttcttttagaagttcttggctgggcatggtggctcactcctgtaatcccagcactttggaagaccaaggcaggcggggtcaagagatcaagaccatcctggccaacatggtgaaacctcgtctctactaaaaatacaaaaattagcttggtgtggtggtgtgcacctgtagtcccagctacttgggaggctgaggcaggagaattgcttgaagctgggaggtggaggttgccatgagccaagattgtgccactgcactccagcctggagacagagcaagactccatctcaaaaaaacaaaacaaaaaaacaaacaaacacaaaaaaagaagttcttgtagtgctggattggtagtggcaaattctctcagcatttttttgtctgaaaaagactatctttccttcatttatgaagcttagtttctctggatacaaaattattgactgataattgtcttgtttaaggagctaaagataggaccccaatctcttttagagattgaagttcttttgtctacttgttcaattctgttgctgagagattccagtgtgttttgtatttctttaagtgtgtctttcatttccagaggttgtgattgtagagtttctgctgagaaatctgctgttaatctgatagggtttccttcataggttacctgatgcttttgcctcacagctcttaagattcttttctttgtcttgactttagataacctgatgactgtgtacctaggcgatgatctttttgcagtgaatttcccaggtattctttgagcttcctgtagtctagatctctagcaaagccggagaagttttcctcaattattccctcaaatacgttttctaaagtttcagatttttcttcttctttgggtacaccgattattcttaggtttggtcgtttaacataatacaaaacttcttggaggctttgttcatttttttgtattgttggattgtgttaatttgaaagctttgtcttcaagctctgaagttcttttgtctacttgttcaattttgttgctgagatgttccagtatattttgtatttctttaagtgtgtccttcatttttagaggttgtgattttttttatttatgttgtctatttctctggggatttttctgtccatatcctgtaacattttcaaaatttctttaagttggtattcacctttctctggtgcctccttgagtagctaaataagcaaccttctgaaggttgagagatttttttcttggtttggatccattgctatgagctagtgtgatcttttggaggtgttaaaggacatcgttttgtcatattacctgaactatttttctggttccttctcatgtgggcacattatgtgagagggaagatctggggctcaagggctactgttcagattcttttgtcccatggggtgttctcttgatgtggtgctctccgccttttcctaggcatggggcttcctgagacctgaactgcagttattgttatttctcttctggatctagccacccagcagagctgcctggctccaggctgccactggggaatgtctacaaagagtcctgtgatgtggactgtctacaggtctctcagccatggataccagcacctgctttgttggaggtagcaagggagtgaagtggactctgtgagggtacttggttgtatttttgtttagtgcacttgttggcctccagccaggaggtggcactttcaagagaccatcggctttggtagtatagggggatacaagcttgccctagggtcacctggataagtatgggggtttctcaggcagtgggcagggccatagagctccgaagagattatgtcctttgtcttcggctaccagggtgggtagagaaagaccatcaggtgagggcaaggttaggtgtgtctgagctcagactgtccttgggcagggcttgcttcggctgctgtggtggatggagatgtggtttccaggccagtggagttatcttcccagggggattatggctgcctctgctatgtcatgcaggtcaccagggaagttggggaatgctggcagttacaggcttcacctagctcagctaccatgaagcccgaaaggctggtctcattcctaccgtatgtcccccaaatggcactaagtttatttccaggcagtgggtgagcagggctgagaacttgccccaggctaccagcctctcgctgagagggttttcaggtttcacacttccccatctgccatggcttctgtgctcctgtctgcactcctgattcaacccttcttccgggttctgtccaggaaacttcgggttcacttgaaattattacaaattcagctggaggtcttttccctgtggtctttccctgattccactggtagccctccccaaggattcctgagacaaaaccagaaatgtgtactctggggactgagagatcccacaggactcttcccaattcttcttgtacctgtgtttttcgctcagctctctaaatttgcctcagctccaggtaaggtcaaatcctcttctcataatctggaccttcaggttcccctgtggttcaggggcagacagttcccctttcacattttcacactttgggcactcacagttttttagctgtctcctgaagctcgcagcagtaatccactctcttccaagggtctgtggattctctcgactctcctggtatgttcctgtggtagttcttggagcaaaagttcacaatatgagtctccacatgctgctttgtttgtccaagtgggaactgcaagttagtcctgcctcctgtctgtgattttctcctataccccagttatcttattagatgcagaccaaaaaacccccaaataattaacattcatttatcattgaccacccccaacaacacactttcaatgctggaattgaactttctgaaactgataaggtacatctaccaaacccatgccacccaacaatcttccagtccttcttcctagatgcataaatacgaatcttttccttatttctatcctttagtgaccacttaattttcttttctttctttctttcttttttttttttttttttttttgagacagagtgttgctgttgtcacccagtctggagtgcagtggcaccatctcggctcactgcaacctccgcctcctgggttcaagtgattctcctgcctcagcctcccaagtaactgggattacaggcacccgccaccatgcacagataattttgttatttttagtagaaatggggtttcaccatgttggccaggctagtctcgaactcctgacctcaggcaatccacccgcctcagcctcccaaagtgctgggattataggcgtgaaccatgaccacttaattttcaagagtagtatgtggtactgcttagctcatcagattctccaagtccctaataatttcctatttgggagctggagaggagatgatacttctaggatgcttcaatttcagcaacattcattttctttttctgagtcatgagcaccagggttcaccctaaaatattagccagatctcataggctgaattaggtcacagggtacaaagtgttgtgcagactggtgcatgtggctcccattgaatataataacagccctttgacacgtgtggcagctgctgccagagcctccagccaggatctgggctagagggtggtacatgtataatttaagtaataacataaagattaaatatgtaattggaaatgatttcatagaataaaactgaagcctggtttatcttgaaaagaaattattgcagacatgtaaatagcttactgtaaagtttaattacagttttagtagcagacaagactcaattgataaatctccacaaggagagtcaagtaggactgaaaatctcactgcacttgcatgaaaacaacaaaagctaaaatgccaaaccgaatgcaagctttgttcatttcctcaaagttaattgttttgactataatcatacagttattatttaatggccatacacaatttatttatcattttctaagagattaatttgaaggtctttttcttgttatttatgtggaatttacaggaaagtcagatattagattgtagttttagggggtgattatttttataactcaattgatttaaatgttaggttttgtcatttcgttgaatccatcagttatcatcagtattcattatttcagttccctctgagaaatgagaggatagttttgtgagtagaaaatgatttgaagagtttggcagaataaaactgaaaactgattcatctgacaaaactcttttaagttcggtacagaaacaaggactagatagttgtctcactaactccattcttggtgttcccttgactttgctgtttattgtgtttttttgttagaatttcttgaatttattaatttttgttacagttccatcatgaaacttactgaattatgtagatttaaattgttttccatggtatttctttattaatgtagaatttgaaaaattcacgcagttctggggagactattttaacttataccctctcctccttcctttttcatctgagcttcctctcatcgatcttaatatttacacctaaaatcttatgagttgagacaatatagaaattaattattgatctgtaaattatgtgaaagttcccaacatagaagcattttatatatattaaatcagtgttagaattcgtggctagttacccgtagtgtaaaattgtatttaggagctgaaagaccgtgagtgtgaatggatgtttaggtggcaattggaaagatttcccagtattctgaagaacataagctatttgacctatttgacataagtcttatgcttccttttacttagatttctggtttgctttcttttggtacatgttatacctgatactgttctacagcggtcttcagtaattttttaaatcttgaaatagaatggaaagattgagagtgacctgctgaggtaactggaccagaacaggttaggagtgcgtgtttataaacacgagggagggtctgagtaggaggacctgaggaatatgtagggcagtgtggaaagggaagacatggaaatgacattgatacagctggttgttcatgccgggtgttgtcactgccccgagactgcctcattgccatgaggaaagatttgtcattttcgggaagaaggtgtggagcggctgggaggcagcacacaatagccctcctgtgggtaggatgttggctagccttgggtttacctcagtgaagacccatgtttaggatgcttgaaaacatctcattagcaactttgtctgttttaagctctggagcagtgaagaattctattaatggcagtaaactttttttttttttaagaaggaaacccaattatgtccctccattaaagttctgatagttagactttttttttttttttttcccagcaagatctctatgtagggtagggagatttcatgctactgggagcaagatgatgcttagtagtagttgatgccttaagactttgcagggtcacatagaatagcatagtcctgggctacatccaacatgcatttcaatcagttcttgggtggtggaaaagggcttgctcaatccgcttcttagcattgaaatgaaagaactcccagttctcagactggcaatgatgtgattaaaaacttgaacttgggtttctgttttccagtcgtggtaggctaggttaccctgaccacttctcctgctgaaactaagtaagattgttgaataaaatagttaaaaatacatttttttctagcgttgaagaaaggagagtaagggattctcaggtaaactgaaggagagcaggaactcagagaggcgagaacggccttggatgcagaagcaccttttgtggaggcttttcagggagcagaggacagggtctacagtttagggagcttcctcccattaagctgggggccttgcaggggcacacctgcagggtaaggtgacagaagacagccaggtttcctgaggatttgaattctgggttctccttactcatatggactcaggaccctcagactctacatttctcaaaagccaatgcagctcctcttcataggagggcacttttattctgtatgctgttaattcactttcaaaaaatcataaagcacaagaaagaagacatctccagctattagcacgaaaagacactataaataaactacaaaaattgaagatactcgaataaccagatatagaatataaaacaaccatgctatgttaaaaaaacagacagtaaccctagggatatctgtggagaccagcaaactataaaatgtagcacagcagatgtgagaaatgagtacatagaacttctggaaatgaaaaatatcacaacaaattaaaaattctaaggaaaggttgaatagtatattagttaatactctaagaagaattagggaagtagtaggtaaataagaaattatctagaacagaggtcaacaaacgtttttctgtaaaggatctgctagtgaatatttttggttttgtggaccacatatggtctctattgcatagcctttcctattttaattttgtttttacagacctttaaaaatgtgaaaaccgttcttagattacaggctatgggatatatttggcccacgggccgtagtttactgaccccaatctatatatacaaagaagagaggagtcacgagaaaacccagaagggcagttgaggcatacagagtagaatgaggaagtttaccgagcttgatcagcctaaaggcaagagaaaaaatagggcagagtaaatatttgaggaaataatagctagggattttctgaaggtggtaaaaagatactaatctgtagattcagaaagtccagtaagtcctaacaaggatcagtaaatacattctctccacgattcatcatagtgaaacttcaggacagcagacactaagagaaggtggggagtaggggatgggtacagcattgcttcctcagagagagaggtgacctctcaccagcaacagagggaccagaacacagcagaatgccattttcaatgctgaaagaaaatacctgccaacccagagctttataggcagaaaaatctttgaagaatggggttaaaatcaaaacactcacaaaagttaagagctgagagtttgctaccagccaacccatactaaaggaaattttaaaggttgcatgttgtacggaaaaaaatattcttgggtggaagatctaagctgttcaaagtataaaaagcaaagaaagtgggaaatcagtgataaaacttagattagtattgaatatatggaacatcatcttgaggggttttaaaaatattgacttgaaatataatacaattgcctgtgtaaattgagaagagtgtgaaatagatatgtttaaaaatcctcatattaccttggaaaataattttcaagcacagttttacagttgatagaaatatgaaattaagacaaaattctttactacattttaagtcgaataattgaacaaaatgttagaaataggcacaatgtagcttgctgcttgattcttgtaatcaagggggaagtggagatcaatgaactaatggtgacatttcactgctttttagtaaaattgtatgaagccatagagaaagggaaggagagacttaaataataagaaaaacctcaacagatctgtgatgcttatgatgggaagttcttttgagagaagtggagtagtgggtgattgggcctaggagtgggagtggaaggattattgatgttgccgttgggcctccatggtatcactcccatgctgttggatttattggtctaagtgtcttcctcactagactctgcattcccagggaagtcatcttatcctaggtacctttgtgtctggctcttcaccagtgcagaagaaggtaccttgaaatgtgttaaaaaatgtttacttagtaactaggaaagatgctcctaatgtaacttgctttgtgaacaaatacgtatgaaatctacataagtgtgttaagtgtcagatttcatcatctctgggctgagtgttggtggaaacattagaggataaattagctatgagatatgttctgtttctgatttaatcttttcatttttctctttttgtttttctcaaccttttctgctacttagtgctttcttgcctctgtctcagatttttatgagccaaatattcttatattctataatctgtgttcttcccaaccagaggtgttatctgcagagactttttttatcagactgaaatccgtcctgcctttttagaatgagctcatttttcttcactccagctaatgctgacatttaccaaatccagtcctgattaagtaagcttccatcaccaagaaaactggaaaaaaggtaggattcataagacagtggattcccatccagtgcttgtagctctgttatcctctttagaagtatctgagggttaacaaaattggaaattgtagaggaaacaaatttgcactgaatttagacctaatttacctgaaaatgggattcctttaaaatccacagtgagcccacagttttgtcctgtgactgagattcagtcacaccttgaccatgtatttatttcataaattaagccttcaggccaggcatggtggctcacacctgtagtcccagcactttgggaagctgaggtgggtggatcacctgaggtcaggagtttgagaccagcctggacaacatggtgaaaccccatctctactaaaaacagacagtactaaaaaacatctctgctaaaaacataaaacactacctgggcatggtggtgcgcacctgtaatcccagctacttgggaggctgaggcaggagaattgcttgaacccgggaggtggaggttgcagtgagccgagatggcaccattgcactccagcttaggcaacagagcaagactctgtctcaaaaaaaaaaaaaaaaaattaagccttcaagaaatgtatatgccaagttggagatgtgtcaatagagctaagcagatttttggtaactgccaaattagtttcttatggagaggggaagcaaagaaatggaaatagtaacaataagataagcaacagtgagaggaatgatgaggagcagaaggaaggagaaggctaccacatgaaagtgggaaagttgagatctgaaattattatattttgaaacctagaaaagtaatgaatctcattctgtcctctctcctctgccctcccatactttgggaaatggtgaaataatctgaaacagaaatgtttatacagggtgagcatccccagtccaaaaatccaaaatccgaaatgccccaaaacctgaaactttttaagtgctgacaggaggccacaaatagaaaattccatatctgacctcatgtgacaggtcacagtcaaaatgcaggcacacaacacatagtttcttcagcatctccaggggaataaaagaccctcttagctccctttagctgatacttgggtcccatccccaagatatctcataatgtatatgcaaatattccaaaattcagaaaaatcccaaatctgcaaccctctggtcccaagcatttcagataagggatactcaacatgtagtacttattgtagggttatttcagatgtgctgtcatattagttaaagtgaaaaattgatttgcaaagttctgatcattttagaattggtgtttaagtccagtagaaatcttcatagttaaatatatttaatattttgttataaattaagtaatgagcaactgaattttaaagaatatattcttagaggcaccctcacttcaaaagaaattgaatttcaacaaaatgccaggactggccacgcacagtagctcatgcctgtaatctcagcactttgggaggccaaggcgggaggatcgcttgaggccaggaattcaagaccacctgggcaacatagggagactttgtcattactaaaagtaaaataaaaattttaaaaaactagctgggtatggtgatgtgagcctgtagtgccagctacttgggagactgaggtggaaggatcacttgagcccaggagtttgaggttgtagtgagctatggtcatgccactgcattccagcctgggcaacagagtgagacttagtctccacaatagcaacaacaaaaagccaggactatgatttttttttttcaaaagttcttctcagtgtcagctcagaagtgataaaaggttttccacctttttttgtgtgttttttattaagaagaaaagatttgaaaggtaaatagaaaaatcttgtaaattcaccaaatcaccaaatacgtgttttgaaacatagtagtttttctaatttatcagtctcattttctaattctatccttatgaccaatatctctgcctttgctctggatttatcaccttcatggacttttggacatgggagaattttatcctgatggaagtaaaactgcacggacttctcttgtgttatagaaatatgtgtgtgtgtgtatacgtgtatatatacacatgcatatagagatatatatgcatatctagatgagcataaatgcataaattatgcatagattataaatgcataaattatgcatagatatatgcatatacctatatatgcatatatctataatgcatgtatgtatgtgtgtgcatatatatacatgcataaatataaatatacatatatctatattgtgtgtgtgtgtgtgagaatggagtgccatccttccccttcctgggctgtaagcttgtttgttagttaagacttcatggtagaaactggtgtattcatctttaaaatattttgcacattggtggtgcttaaacggcttactgaattggactctccaagaagggtatttcttaatagaaaactgtcttgctttatttgttttcgtttacacttaactagttgacataaccctcaggacaaggactgtgggcatttctttccttgctggtcttacaagctactgatatatggcatttatgactttggcagagatggtgggttaaatcaaggggccaggattccttcatcacctaaggacttgtggtttataaatacagaagaggaaaaggagacaaatgaaattacagaaatggcctcagcttgattgagttataaccttcactgtctgatttttataactctaggcaagtactctaccttttttatttcacttcaatgtaatttatattttgctaagttgttaggtggcccagttaaccttaacaagatacttaatgttaactagttttctgaatattttcaatggtgcctctattagagagtattgtatgtaggtgaacaatgtatttcccaagcacaaattacagtatttcctcaaattatatgttctaaaggcaattgaggtatgtatgtaattatgtgttaatcaagttagtgatttgctattaattgggtaagtacaagttgtgtgagttacacttgcacaggggtggtcttgtctctgagctgctttcagaaaaatagttcaaccaagtaaattgattagtacaattttcctatgaccaatcctcttaagtttttcatttctatttcaactcctgtaagtttaacaagattatcattttaaaagaaattccttccatctgcagatgtgtgttgcttctgatatatttgaatcagctgaaatctaaaagttttttacataggaattatctctaaagatataaaatggtcttatttttccttaatggtgttaggaaaacctaatagcaacaatggattgtgcatgatcaattttatctagtcacattttgggggatctttaagcaagaataggcaacaagaaaatgtgcatttagtgttggaagggatgagagattagttgtggatctgaggattattcttgcctcaacaagtggagaattggagatactcttcatgaggagtgacactcaagtttgagccccgtaatcaagagacaggagaaatgttaataagagaaaaccttttattttgtcagatccctttttgaggaagaacaaatgcagtttttgaaagcattaagcatttagaaaagggtgcagaaatgtagtaggacaaaatgtgccttaaaacatacagcctctttatgtccaaagcttccacacaacgtgaagtaattgtctgaaattacaagtgctactatagtgattgaactctagctgctaattgagccttcaggtttaaaaatacacaggcctcagcaattcaaagattattaaattacaccttcttgtgggaaccaacatcaatgtgtttgagcagtgagtagtgaaggtctttggggaggcaggggcagagggtgtctcattacagcgtttgccactgcagatctcttgagggttgttgctttttctcaagacgaaagattttgttaacacttcattccacagaatgttgaaaaaagtggagctctcttgcatcacatgactgttactgcaagttttgtgttgatctctgaataactagaaatttcaaaaatttacttatgaaccaaaaggcataattggtgtataactcaattatttttatttaatcctcacaacagcctatgatgtgaatggctgtgttcccattttacggatgaatatgttaggctcagaagtgacctgtcaaaggtcacacaactaagtagaattgctgagactgcatctactggctctgaagtttgtttgtttgtttttttaaactatgtcttagccatctgatgtttcaaaggttatacagtcaaaattgaatcaatgtgattgtaatgtgcctttccaaaaaagaagatgaatactggatactcactgaacacaagtggtttattctttcgttcagcaaatttattgtgcaacttttgggtgctaaccacaattttaggcagctgggaatacacgattagaaaggatctagaagattccttcctgtcttggtcaattttctgttgctataacaaaatgccacagattggggtaacttacaaagaaaagtttatttagctaatggttctggaggctgggaagtccaagagcatggtgctgacatctaatgagggccttcttgctgcatcataacacaggagagggcaccatattgcaagagcacaagagcatgtgtgtcagctcaggtttctgtacatcttcttttaaagtcaccagtaccattgtaggggtcccaccctgatggccttgtctaatcctaattacctcctgaagcctccatgtccaatcagcatatgaatttgggggttaagttttaaatgaatgaaatttggggaacatatttacatgatagaagttccttaaatagaactcagagctcaactgtgggaaggtagacgaatgaataagatagcataagtacattgaaagataagtaagaggatgatgtgttaaggagtggtatggggagtaaagaagtcacccttagtgtattagtctgttttcacaccgcggataaagacatacctgagactcggtaatttataaagaaaaagaggtttaatggactcacagtcccatatggctggggaggcttcacagtcaaggcagagggtgaaggaagaacaaaggcgaacaaaggcatgtcttacatggcagcaggcaaagagagaatgagagccaagcaaaaggggtttccccttagaaaaccagcagatctcgtgttacttattcactaccacaaaagcagtatgggggaaactgcccctatggtttaattatctcccaccagtccctcccacaacacgtgggaattatgggagccacagttcaagatgagagctcggtgggaatacagctgaaccatatcacttagatagggtggtaaacagagtcctcagtgaggagctatttctggcctgagactccaggagaatgagatgggaccaggggtggatatgccagacagaggaaatagcaaatgcaaatccgccaaggtggtacagtggcagaatacataggaggtggtgtggcagagcctcaggagcaaaatgagcccagtgaggtcaagaagcagacaaggaaagaccatgccatgcagggccctgtagaacatggaaggaagcaggattattctagatgcaatgtgaccccattgacagggctgtggattgaattatgttcccccaaaatttatatgttgaagcgctgacccccagtgtggctgtatttggagtaaggaagcaattatggttaaatgaaatcataagggtagagccctaatctgataagattagtgtccttagaagagaaacacctgatctctctctccaccatctcaacgccatgtgagaacacggtgagaaggtggctgtctgtgagccaggaggagagcttttatcagtaacataattggctgacaccttgatctttgacttctagcctccataactttgagaaataaatgcctgttgtttaagccacccagtctgtggcattttgttatggcagcctgagcagaccgagatggaactgaaagtattgtcattaactgagatggagctatctggaggaaatgcatcatttggtgaggccactctggctggatattagtcctcagtgttctgaaacacattcttccctgttggattctgtcataaatgtagttgatgatgccagctctcaccatcaaggctcataagtgctatgagccagatgcaagggttttacttaacaatgaaaattttacctgtcaggtgaactgagtctatggcttgggctgacataaagaagccatgatcacattgagaagccatgttatccatattgcatggtgaactgggactccagatagaagggcacttcattctcccactttactgtttaatggtgtcagatgtgtggctatggttccacaaagcctgactggacactcctaggccaccctccctcttgctgacttagaaacccatgctgtctgcctctaaccatctttatagtctttcattttagacctttttctgacccacattaattccttcagtcaagttacagttgaggtccattgggtctgggagccattcattctctttaagataacatcacacagctttgctttaccctttatgttaattaatcctgctgtatgtcctgattgtggaatgtctctccaagcccacagccattactctgagcttctctttctgtagtccacacctgtaaatgcacttacgttttcatacttccttgccttttattcattctcatcgctttgcctgagtattctttcctctcttcctaactcaggacaacactgcctgtattagtcttctaggctgctatgacaaaataccacaaactgggtggtttaaatagcagaaacttgtcatctcacagtctggaggctaaaagtccaaaatcaaggtttctgcaggatcagtctcctctgatggttgaggggagtctgctccaggcttctcctccagcttctgagtgctcaggcgtcaccttccctctgtatatgactgtgtacacattgtcactttataggacaccagtcatgatagattagggcccaccctgaagatttcatcttaacttgattacctgtgcaaagactctgtcttcaggtaaggtcacaggctgagagtactgggggttaggactccaacatacgttttattgtgggacattatttaacccataacattgccccttctttcctccatgagagggaacatcacatcaccagcatcctaagcccttgtttgataacttggtgatcatcactcttccaggggagcataattggtcacctatgagactaataggtctgttggccactgtccttgtaactcttctgtcatgtttattctctgacttgcctgtcacccttactagaccatagtctccttgaggacaggatcaaaccagcattgtaccctgctcctgggcacatagaaagtgttcgtagacagaacacatgggcagtctcaagtaaacatattggctgttgattgttgtaacctcttcagtctaagaataatttggctcaataaaaaaatttttagaagaagcaatagaatagcaaatcatatcattgaaaagcatagaggtttaaaatatttttaaaattaagactagttaacacactataatgaaggcacagttacattaagtctattttcttggtatgaaagatgaaaaaattaatgattttccttttaatcagccgtttaatcttgtagatagtcttcataaatttcttccaatcaccattagtaatactctttcctttttgaaataatagctcgaaatataaatatctttattttatttgctatttaaagagctgccaagtatttgcgttaggtgagatggtgcatatgatctgtagcagtttgctgtagctttcgggaggctatttgaaggaatagcttaagctatgaggcaaggcccatcagaatgtcatctttcattctttctctttgctctgtggtcacccgcccccttccaccctctgcctttttactgtgttagatcagcgtcgcttctgttttccagcataaaacccctgacctcaagtgaagaaatactggtttaacatatacggtgtaaattgttctgctttctataaacttttatactaatatttttattattttgatatttgagagggaaagagtaatataatattgcagttcatatggcagccacagtttaattttatggcaaagtcaacgactttagagttgctgaagtatttatagtactgaaagctttgtgttggcaatttctttcaaaggaagcaattcttattattatatcatggacatgcacaccactctcatgctgtttaagacacctttttgtcccccccccaccaccaaacagggaactgggagggaaaaccaggcctcaaattttgtgtgcttgcttctcatgttttatttctaagtgaattagaccatatggtcacataaacccaaagctaggtggtacagggatttaagtttgtggccttgaagtgattctagttttgctttcaattagtggaaaataatgcattcatagaacaatttataactcacacagacccattcgtgaaaagcccactccagatattgttgcgtgtgtccaggagaagtggcagcgttgatctccatagagatgactaatcagttgagactgagccctttcccttttccatgcgacagcatttatttgttgtgacactaatttcaccatgtcagttttccctgccagtgtgccccagccctaatcctcatttcacatgcatcactgttctcccctcattgaaacttggcttgaggctaacaatattaagtggcggaactgtggtttgctaaacacaactagctgatgctcatgtactcctatgaatagaaagatcttccgaatatttccttgagggaatgggctctacaggaaatcttgagacagcccttatgttgatacatgtaaaatatgcttcttaataatacatgttggtgataatcagataaatggagtgttgactgcgaacctgagcaatgtgcctggctaatgaataggatgtttattttctgttactactctggacataccaaaggcaactgcatcatctattaaaaaaaaaatccttagggtccgctttctcatccttcattttaatttacaagagcagtaactacttctgggactgactggagtattttctggggattaagtctggttcaaaggcctttggctgtgctggaggccataggtttcagtgtgaaataactgcctgggtgtctgtattgtcatagcttaattacagtatttgcatcttgagttgttgactgtgggttttctaagactttgagagtgctaagtgtgatttgcttttcagtttctgacccagcaagcaaatcccaggcaatgttaagtaagaaaaaacatacctgtggtttttgcagggagaaaaactcatcttcaaaattgacagcatcactgtccaacaggactttctgcagtgatggtgaggctcatctgtgctctgttcagcacctccgctcacgtgtggctagtgcaaccgaggaattgaattttaaattttatttcattttaatttatatgtaattaggcacatgcagccagtagctaccatattggatggtgtagatggagaatatctttgaagaccaaatacagttcttcctgatgatttatagtaaatttaatgtacttaggtctactccaggtatttttggtcttaagttgatttgaggattttttgaagtcatgtaaactttatgaaacatcattttgtcaagtgctggataatgattatatttactctaaaagaagatgcttgctgcttatgtgtgaagagagtaatttggtgacctcctacttcattcacaagctggaggggacaaatactatacctatactaggcactgtactttctcagtgggttgctcatatacctttagtgacccatggaatatcattacaatgttttgcaggggtattttcaaaatgccaccaccaccaacatataggcatgatgccctccacttcttgcagctttacatagactgagatacaggaaaagctaaagtgttttgcgtactctcactcagtacaatacttctaacaccagaaatgtggggagttttcccaacatagcaaaccaagcagttttctagcagcaaacaccaactgggtgtcctacaatttaactcagttggagttggatcccacagattaagggctcagccccacaaggctctccccgaccttagaatccaatcgcaagccccaccccctgacaccccctcatggttcgattaatttactagagtagctcacaaaactcagggaaacactttacttacattttcatatttatcataaaggatgttatggatgaacagccagatagagagatgcataggtcaagtatgggaagaggctcagagcctccctgccctcctcaggaacctgcatgtgttcagcaacctgaaagctcctgaaccctgatttttggggcttttatggaggcttcaccacgtaggcatgactgattaactcactggccattggtgattcactcagccttcagcccctcccctccctggaggttgaggggtggggctggaagtcccaactctctaatcctgcctcggtctttcctgtttcaccctgaagctacctagggaaaccaagggggtagggtgacctaggggtcactggtagccatctcattaacatgcgaaagacatcactcttgagattccaaaggtgtttggggctctgtgccaggtaacagggatgaagagcaaatacatatttcacaatatcacacacattacagacccccctgacttttgctctaatgtttctatcctttgcctcatgctacctttcacctgattggcttccgctggccttgcgttaaatccctgcaggtgtagctcactgggtaggatgggccttaggtaaagacagaatcctgagctgctctgtgggccagtcccctgggagtacctttaatttggtagagattcagaggaagattgacagtctgcgtcttctgtgatgagggtgccttttactcctccagcttagccgggaagctgccctcttgcgtgggagaagttgtgctctgctcacccctctgagcttttcctcactttcccagcgaggagactctagaagttactctcagagtcacagtctgtttgccaccaatagtttggctatgcttttatgcctaagtgacaaactgtaagtttttacttttaagtaaaactcctgagtcacggaagcatgtttagtatctaagaatgtttgattctcaaagtattgaaaaagaagattctgctcacttgttcagcctctacttgatccctgttagcacagaaagatgcagtcagatttctcttgagcttggtgatatcctttataataacctttagagatccgttctattaatgaggcatgatattgttactccaattgtgcacacaagctgggggacctccctttcagaatggcatgtaaagaaattccttccctcctggaggcttcattatataccctacatgcagtgctcggcagtctgcttttaaggtgagtcattgtatagtatgatttctcagacttcaaggacagataatacacatcacgagcctcagaacagcttacttttcagccttaccttcctttacagagagagagataaagagagcaagagagtgcatgggaatacgagcgagatcacctctttgtctttttagaaatcctgtacgtgggcattaaaattaatttagagtttcttattatgtcctttcaataatagcaacaaaataattataatgacaacaatgaagtagccaccttgtgtcattttgtctttggctaagtcttgaattcctgtaatttaggtgtgagataagttggatgtaaataacattatttaaatcaagattatagggaggctggacgtggtcgctcacgcttgtaatcctagcactttgagagtctgaggtgggtggatcactcgagcccaggagttcaagaccagcctgggcaacatggtgaaaccttgtctctgcaaacattgtaaaaattagccaggcatagtggaatgtgcctgtagtttcagatactctggaggctaaggtgggagaatggcttgagcctggaaggttgaggctgcagcgaggcaagatcgtgacactgtactccagcctgagcaacagagtgagaccctgtctcaaaaaaaaaaaaaagatcatacggaaatccgactgcttcacaaacattcttttgttgttgatggaaaaaccaattgactattaagagtgatagagacaaacaaactttaatgctgtatctaaatatctgaaaacttcatcaggaaatgtatgaatttaaagcggataaactcagtcaagcttgacacagacactagcagtctctacttccggttaacagctgtttcaggagacagcatctcaaaatgagttgtcagaaaatctgcctgattttctcgagggaccgaagctacaattgggaattgagctcctgatggagtaggcatcaaataaattggacccatgaatatcaataatttcttaaaagtaaatactcagtaattctaaatactagcctttaaaatggtgacattatgctgtaactgcagtaagtcctgttagggcgctgttattagtcccataaagtgctcattcagaaataaaattctaacatgtcaaaaatcgaacccaaaactaagctataaaaaatttttaagtttaatgagtaacagtttgtcttaagccttttaaattatgacttacatgatctcttaaggcccccttggaagtttgaactgatgaagttttcttttaaatggatcttcaccaaagagtggaattgaaaataagtccatgtatcttagtttgtctctgccattgtctcatgcagttgtgttttgtttattttagtttttgaaattaaaaatgactgaaagacctgtaccaagcatttctttcacttgccttctctaaatctgttcaagtttattcagaattataattttaactctttgatatctgatcaagcagaggcctcccacattagggagttaacgactgtgaaggcttaaacttatggacacttaccatagtgtttagcaattgtttagaaaccgtaagaacaattactagatcattagcaagcacttttttttggatgggggagaagctgcaaaatatctcctgaaattgctcttagggatgttccctctaattttaaaaagtaaaggggaaaaatgaatttgcattcactggtgtgtgctgtttcagtgtcagcaccatgagttaggattgtattgtgtgtcagaactttgctctgtgctggggatgtaagaccaaagtcaccatgctcatggcttcagtctcatgaagcatgacccgtgtaacattttaaaagagacaattcataaacacacttagagagcattgtagaaataaaggagaatgtgagaaggagtgtgctaagattggggaaggttaaacttgaacagtgacttggggagaaagcacttagggaaaatgaggtatgtgaagccattccttaacagaaatcgccatagtttggggagtgttctactaaatatttgtactgcaggctgtgtaaatgaatgtcccatgtgaagaggtaattgtggctgagatcgaggatgtgacgtctcgagactccccttttggagattctcaaatcacagaaccatattaacatctctgagacatcctcctgccaggaaacctgtttaaatccgtttattgcaggattttccaaactcaattgagcatggagtccttgtaatactccatggaatgatttctgttaaatggtttcagggaatgctgtctgttggaggcatcagacagactggaaagcctggctgaggtcaggcataggaggccctataggccatgctcaagttttgaagatttcctctgtgcaaaaattttagtgtcctcacatcccctatcagaaatggaactgctataattatactgagcctctctgctttggaaagacataaaaggaaaagctggacctttgtcctcaaggggctcagagattaatgagaagacagaaatacaaactattgtgatacataacaaaattattttaaatggagcttttgcaaaatgctttctacaaagacagcgcaccccctcctgttctgcggggattcactaaagcttcaagtccagatttgcatgcctggaggatggacgaggaaagatggatgagtatggggggaagaggtgggggacgtagtggtgccaggatcaaggactgatggaagtccacagtgaaggccgtgggagttggtgagaaagaggtagaaggtgaaactggcaggatttggggagtggattttgaggacaggaaggaatatctcagaattatgaaagcttttgtctcaaacaacttagtgtcaaatacattccctgtagcagggcctttttttctaaccccctgctgtgtttctgtctagactcttgctcagcacagtagacattaagaaatatgagttgacagattgttatattttataatgtacaaaatcctatgctactaagttttaacaactacttttagttaagtgttttatatgcatggggtatcctcgggatagaatcctaatcctgtgatgaagattgtcattgattccatcaaatcacatataggtttgtaaattcttgctttaggaattgctgtctttaatctgccctatgttcttagtattcccggaaatatcatcttattattattattttctaaatctaatatcaatggacacaaaacagatatgacaatccatgaagcataaacaaacatgaacctgacatccaactaggagattccttttggttccacctgctcttcccctaccacaatctcgccttcactcctgttctgaattttgtgtttattattccctagtttttagaagcagtttctccccatatgtgcatgtttttctaaacaacttttggtttagttttgcttgtttttgaacttgaagaatattgtggctgggtgtggtacctcatgcctgtgatcccaatactttgggagaccaaggcaggatgattgctggagcccaggagtttgagaccagcctgggcaacatagtgagtcatcatctctatgaaaaataaatgtagccagacacagtggtgcatacctgtagtctcagctactcaagaggttgaggctggaggattgcttaagattgggaggttgacactgcaatgagttgagattgcaccactattgcactctggcctgggtgacagagcaagaccctgtctcaaaaaaaaaaaaaaaaaaaaaaaaaaaaagattaaaaacaaatggctgcacttgaaagcacagattgagtctatagcttccagcatgagcgatgcagaagatgggtgatatctgcatttccaactgaggtactgggttcatctcactggggctagttggacagtaggtgcaggacagtgggtgcagcccaacgagcatgagctgaagcagggcgaggcatcacctcacccaggaagcacaaggggtcagggaattccctttcctagccaagggaagctgtaacagatggcacctggaaaattgggtcactcccattctaatactgcacttttccaatggtcttagcaaatggcacacaaggagattatatcccatgcctggctcagagggtcccacgcccacagagcctcactcattgctagcacagcagtctgagatcgaattgcaagatggcagcaagcttggggtggggcgcctgccattgacgaggcttgagtaggtaaacaaagcggccaggaagctcaaactgtgtggagcctgttgcagctcaaggaggcctggctgcctctgtagactccaactctgggggcagggcatagccaaacaaaaggcagcagaaacctctgcagacttaaatgtccctgtctgacagctttgaagaaagtagtggttctccaggcatggagtttgagatctgagaatggacagactacctcttcaagtgggtccctgacccccgagtagcctaactgggaggcatccccaagtaggggcagactgacacctcacacggccgggtacccctctgagacgaagcttccagaggaatgatcagacagcaacatttgctgttcagcaatattcactgttctacagcctctgctgccaatacccaggcaaacagggtctggagtggacctccagcaaactccaacagacctgcagctgagggtcctgactgttagaaggaaaactaacaaacagaaaggacatccacaccaaaaccccatctgtatgtcaccatcatcaaagaccaaagatagataaaaccacaaagatggggaaaaaacagagcagaaaagctgaaaattctaaaaataagagcacctctccccctccaaaggaacgcagctcctcgccagcaacggaacaaagctggatggagaatgactttgatgagttgagagaagaaggcttcagacgatcaaacttctccaagctgaaggaggaagtttgaacccatcgcacagaagctaaaaaccttgaaaaaagattagatgaatagctaagtagaataaccagtgtagagaagtccttaaatgacctaatagagctgaaaactatggcacgagaactatgtgacgaatgtacaagcttcagtagccgattcgatcaactggaagaaagggtatcagtgattgaagatcaaatgaatgaaatgaagcgagaagagaagtttagagaaagatgagtaaaaagaaactatcagagcccccaagaaatatgggactatgtgaaaagaccaaatctacattgattggtgtacctgaaagtgatggggagaatggaaccaagttggaaaacactctgcaggatgttatcctggagaacttccccaacctagcaaggcaggccaacattcaaattcaggaaatacagagaatgccacaaagatactcctccagaagagcaaccccaagacacataattgtcagattcaccaaagttgaaatgaaggaaaaaatgttaagggcagccagagagaacggtcgggttacccacaaagagaaacccatcagactaacagcggatctcttggcagaaactctacaagccagaagagagtgggggccaatattcaacattcttaaagaaaagaattttcaacccagaatttcatatccagccaaaccaaccttcataagtgaaggagaaataaaatcctttacacacaagcaaatgctgagagattttgtcaccaccaagcctgccctacaagagctcctgaaggaagcactaaacatggaaaggaccagtaccagccactgcaaaaacatgccaaattgtaaagaccatcgatgctaggaagaaattgcatcaactggcaagcaaaataaccagctaacattataatgacaggatcaaattcacacataacaatattaaccttaaatgtaaatgggctgaatgctccaattaaaaggcacagactggcaaattggattaagagtgaagacccatcagtgtgctgtattcaggagacccatctcacatgcagagacacacctaggctcaaaataaagggatggaggaagatctactaagcaaatggaaaacaagaaaaggcaggggttgcaatcctagtctctgataaaacagactttaaatcaatgaagatcgaaagagacaaagaaggccattgcataatggcaaagggatcaattcaacaagaagagctaactatcctaaatatatatgcacccaatacaggagcacccagattcataaagcaagtccttagagaactacaaagagactcagactcccacacaattatagtgggagactttaataccccactgtcaacattagacagatcaatgagacagaaagttaacaaggatatccgggaattgaactcagctgtgcaccaagtggacttaatagacatctacagaactctccaccccaaatcaacagaatatacattactctcagcaccacattacacttattccaaaattgaccacatagttggaagtaaagcactcctcagcaaatgtaaaagaacagaaattataacaaactatctctcagaccacagtgcaatcaaactggaactcaggattaagaaactcattcaaaactgctaaactacatggaaactgaacaacctgcttctgaatgactactgggtacataacaaaatgaaggcagaaataaagatgttctttgaaaccaatgagaacaaagacaaaacataccagaatctctgagacacatttaaagcagtgtgtagagggaaatttatagcactaaatgcccacaagagaaagcaggaaagatctaaaattgacaccctaacatcacaattaaaagaactagagaaacaagagcaaacacattcaaaagctagcagaaggcaagaaataactaagatcagagcagaactgaaggaaatagagacacaaaaaacccctcaaaaaatcaatgaatccaggagctggttttttgaaaagatcaacaaaattgatagactgctagcaagactaataaagaagaaaagagagaagaataaaatagacacaataaaaaatgataaaggggatatcaccaccaatcccacagaaatacaaactaccatcagagaatactataaacacctctatgcaaataaactagaaagtctagaagaaatggataaattcctcgacacatacaccctcccaagactaaaccaggaagaagttgaatccctgaatagatcaataacaggctctgaaattgaggcaataattaatagcctactaaccaaaaaaagtccaggagcagatggattcacagctgaattctaccagaggtacaaggaggagctggtaccattccttctgaaatgattccaatcaatagaaaaagagggaatcctccctaattcattttatgaggccagcatcatcctgataccaaagcctggcagagacacaacaaaaaaagagaattttagaccaatatccctgatgaacatcaatgcaaaaatcctcaataaaatactggcaaaccaaatttagcagcacctgaaaaagcttatccaccatgatcaagtgggcttcatccctgggatgcaaggctggttcaacatacgcaaatcaataaatgtaatccagcatataaacagaaccaaagacaaaaaccacatgatgatctcaatagatgcagaaaaagccgttgacaaaattcaacagcccttcttgctaacaactctcaataaattaggtattgatgggatgtatctcaaaatagtaagagctgtttatgacaaacccacagccaatatcatactgaatgggcaaaaactggaagcattccctttgaaaactggcacaagacagggatgccctctctcaccactcctattcaacatagtgttggaagttctggccagggcagtcagtcaggagaaagaaataaaggatattcaattaggaaaagaggaagtcaaattgcccctgtttgcagatgatgtgattgtatatttagaaaaccccatcgtttcagcccaaaatctccttaagctgataagcaacttcagcaaagtctcaggatacaaaatcaatgtgcaaaaatcacaagcattcctatacaccaataacagacaaacagagagccaaatcatgtgtgaactcccattcacaattgcttcaaagagaataaaatacctaggaatccaagttaagggatgtgaaggacctcttcaaggagaactacaaaccactgctcaatgaagtaaaagaggatacaaacaaatggaagaacattccatgctcatggataggaagaatcaatatcatgaaaatggccatactgctcaaggtaatttatagattcaatgccatccccatcaagctaccaatgactttcttcacagaattggaaaaaactactttaaagttcatatggaaccaaaaaagagcctgcattgccaagtcaatcctaagccaaaagaacaaagctggaggcgtcacgctacctgacttcaaactatacaaggctacagtaaccaaaacagcatggtactggtaccaaaacagagatatcgaccaatggaacagaacagagccctgagaaataataccacacctctacaaccatctgatctttgacaaacctgacagaaacaagaaatggggaaaggattccctatttaataaatggcgctgggaaaactgggtagccatatgtagaaagctgaaactggatcctttccttacaccttatagaaaaattaattcaagatggattaaagacttaaatgttagacctaaaaccataaaaaccctagaagaaaacctaggcaataccattcaggacataggcatgggcaaggacttcatgtctacaacaccaaaagcaatggcaacaaaagccaaaattgactaatgggatctaattaaactaaagagcttctgccagcaaaagaaactaccatcagagtgaacaggcaacctacagaatgggagaaaatttttgcaatctactcatctgacaaagggctaatatccagaatctacaaagaactcaaacaaatttacaagaaaaaaacaaccccatcacaaagtgggcgaaggctatgaacagacacttctcaaaagaagacatttatgcagccaacagacacataaaaaatgctcataatcactggccatcagagaaatgcaaatcaaaacaatgagataccatctcacaccagttagaatggtgatcgttaaaaagtgaggaaacaacaggtgctggacaggatgtggagaaataggaagacttttacactgttgttgttactgtaaactagttcaaccattgtgtaagaccatttgactatttgactcagccatcccattactgggtatatacccaaaggattataaatcctgctgctataaagacacatgcacacgtatgtttattgcggcactattcacaatagcaaatatttgggaccaatcaaaatgtccaacagtgatagactggattaagaaaatgtggcacatgcacaccgtggaatactatgcagccataaaaaagggtgagttcatgtcctttgtagggacatggatgaagctggaaaccattattctcagcaaactatagcaaggacaaaaaaccaaacactgcatgtactcactcataggtgggaattgaacaatgagaacacttggacacaggaaggggaacatcatacatcggatcctgttgtgggatggggggaggggagagggatagcattaggagatatacctaatgtaaatgacgagttaatgggcgcagcacaccaacatgggacatgtatacatatgtaacaaacctgcatgttttgcacatgtaccctagaacttaaagtgtaataataatttaaaaaagaatattgtgatcctctggtttttcctgaaaaaatgtatccatgttttaatacaggtatagttcctcttcactgctgtgtattgttacatcatagcatcatgttttcatcctttcttctgttgatggacatttgggttgcttgcagttttttgttgttatgacagtgtctttgtgaacattcttgtatataacccctgctgtgtgaagctttttctaccatttatatatggtaagagacagggtccagtttcatccttctgtgtatggacatccagttttcacagcactatttattaaagagactgtccttttccctatttgtattcttggcaccagtgttgaaatcaattgaccgtatatgtgagttcatttttgggccttctattggtgagtctttttttgtgtgagtatcatgttgttttaattactatcactttatagtatcgtttgaagttaggtagtgtgatacctcccactgtgttctttttcttcgtgattgctttggttttgttttgttttttttttcagttccagatgaattttaggattgttttctcttcatgaaaaatgactttgaaatcttgataggtattatattgactctttagcatgccttgtgtagcatggacaatttaacaatattaattattcctgtctatgaacattgtttttttcatttatttgcatctttttccatttctttctttaacattttatagttttcagtgtacatgtctttcacctccttagttcaatttattcctattttatttgtagctattgtaaatgggatttttctcttgatttctttttcagaatgttcattgttagtgtatagaaatgttcctgatttttgttagttgactttagattttgcaactttattgtatttattagttctgagttttttggtggaatctttagggttttctctatataagatcatgttgtcagcagtgattgtttcattttgtactttccaatttggatgccttttatttctttctcttgcagaattgctctggcaaggaatccaacattcaatagacatgttggatttttgtcagatgcttttcctacgtctaatgagatcatatagtttttgtctttcattctgttaatatagtgtatcacatttattgatttccatatgttgaactatccttgcatcccagggataaatgccacttcatcttggtgaatgattcttttgatgtggtggcaaattcaatttgctgtattattgaggatttttgcatctgtgttcatcaaggatattggcttgcagtatttttttttttgtgatgtccatgtttggtttttgcatcagagtaatactggcttcataaaaggataccttcctcttttattttttttgaaggcgtgtctaaaaaattcatgtcagttcttcattacagcatttggtacaattaaacagtggagccatctagccttgggattttctttaatagaagacttcttattactgattcaatctcctcacttgttagtggtctatttagattttctatttttcgtgattcagtcctaataagttgtatatatgtagaaatttatccacttattctaggttatccatttttggggaatataatttgttcataatgttctcttatggtcctttggatttccgtgctgtcagttgtaatattgcctctttcattgctgattttatttattttgagtcgtattttgggttatctctctagtctagctaaaggtttgtcaattttgtttgtcttttaaaaaatccaactcttagttttgttgatcttttgtactatttttctagtctttattttatttatttctgctctgtattagtccgttttcatgctgttgataaagcacacccaagattgggaagtaaaagaggcttatttggacttactgttcctcatggctggggaggcctcagaatcattgtgcgatatgaaaggcatttcttacatggctgcagcaagaaaaaaatgaggaagaagcaaaagcagaaatccccagtaaatgcatcagatcttgtgagactattcagtatcaccagaatagcacaggaaagactggcccctgtgattcaattacctccccctgggtccctcccacaacatgtgggaatcctgggagatacaattcaagatgagatttgggtggggacacaaccaaaccatatcatgctctgatcttaattatttctttcctttcactcatagtgagcttagtttgttcttctttttctgtttccttgaggcataatattaagttgtttctctgagatcattcttctttcttagcataggcatttattgctgtaaaaactttcctcttgcaactgtttttgctgcatcccatgagctttggtatgttgtgtttccttttttgtttgtttcaatatatttttaaattttcctataatttatttattgatccattggttgttccgaaggatgtttaatttttatgtatttgtgaatttttgttttgaaatttctcctgttactgaattctagtttcataccattgtagtcagaaaaggtgcttggtatgattccagttttattaaattttctaagacttgtcttgtggcctgtcatatgatctgtcttggtgaatgcttcatatgtgcttgagaagaatgtgtactctgttgttgttggatggaatgttccatatctgtctgttaagtccattaggtttaaagtgttgtttaagtccagtgttcccttattaattttctgtcttgatgacctattattgaaagtggagtattgaagtcccttgctgttattatattggaatctatctctcccttaagattctttaatatttgcattatatatttaggggctccaatgctgggtgcatgtgtatttacaattgatatatcctcttgatgaattgaacccattgttattatataatgtccttctttgtctctttttctagttttttacttataaagtctgttttgtctgatttaagtatagctacctctgctcttctttgctttccatttgagtgaaatatctttttctatctcttcactttcagtctatatgcacccttgaaaatgagatgaatgttttgtaggcattatatagtttagcctttaaaaaaagcatttagggctgggcaaggtggctcacacctgtaatcccagcactttggaaggccgaggcaggtggatcacgaggcgaggtcaggagttcaagacgatcctggccaagatggtgaaaccccatctctactaaaaatacaaaaaaattagccaggtgtggtggtgggcgcctgtaatcccagctgcttgggaggctgaggtagagaattgcttgaacctggaaggtggaggttgcagtgagccaagatcgtgcctctgtactccagcctgggcaacagagtgagactccatctcaaaaaaaaaaaaaaaaacacacaaaagaatcatttagtcactctgtctttttattagggaatttaatcaatttacattcaaggtaattattgatagataggcaaggacttagtattttgtcagttttgttctggttgttttaagatactttgttcctttttccattcttgcagccttcctttgtggtttgatcgttttctgtaatgacgtgctttgaatccattctatttttctttgtctactatagatttttgctttgtagttactataaggttcacatggagcatattatacttctggcagtctatttcaagctgataaaaactcaagtttgattacatgcaacaacactacacttctctttcccccattttatgtttttaatgtcagaatttgtcattttgtaatatgtattccttcgtaatttattttagctatagttgttattaatagttttgtcttttaacccttgtacaaggaataaagttgccttatgcactgccattacagtcttagagtattctgaatatagctctgtattacttataccattaactattatgttattaattcacagccttttgtttcagcttaaaaaattccctttagcaatttctgtaaagcagacctaatgatgataaacttccttagcttttgtttgtctggaaaagtttctgtttctgcctcattttggaaagacagctttgctatgtaaaatatttttggttggcagattttttcccccttcactttgaatatatcatcccactcttagtctgctggatttctgctaataaatttgccaagatagtcatattgggacccctttgtatgtaatgtatttcttatctcttgctgttcttagaatttcttctttgtctttgatttagatagtttgattattatgtgtgttagtgaatgcctctttgggttgaagttgattagaaacctctctgtttcctgtacttggatattggcactttccccccagtaagaaaagttttcagccattctttcttttttctttttttcttttttttttcttttttagatggagtttcactcttgttgcccaggctggagtgcaatggcgtggtctcggctcactgcaacctctgccttctgggttcaagtgattctcctgcctcagcctcccaagtagctgggattacaggtgcctgccaccatgcccggctaaatttttttgtatttttagtagagatggggtttcaccatgttggccaggctggtctcaaactcctgacctcaggtggtttgcctaccttggcctcccaaagtgctgggattacagacatgagccactgcacccggcccattatttctttaaatatgctttctggccctttttctctttcttctccttttgacttgctattatgcgtaggccaggtctcttgatgatatcccataattttcatagtctttctttattcttttttctttttatttctctaattggataatttcaaagttctgtctttaagctcatttattcttttctcagattaattgagcctggtgttgaaactttctcttgcattttccagttcagatattgcttcttcatctctatgatttctttcttttacaaaaaattgtttccatttctttgtcagtcttgccatttggattggttccaggaccctcctctcccccatgtataccaaaatctgcagatgcttaagtctcttctataaaatggtgagtaggctgggtgtggtgactcacgccagtaattctagaactttgggaggtcgaggcaggtggatcacaaggtcaagagattgagactatcctggccaacgtagtgaaaccctgtctctactaaaaatacaaagattagctgggtgtggtggtgtgcacctgtagtctcaactacttgggagtctgaggcaggagaattgcttgaacctgggaggcagaggttgcagtgagcctagatcacgtcactgcactccagcctggcaacagagtgatattccatctcaaaaccaaaacaaaacaaaacaaaaatggaatagtttttgtataaagcctatgcacatcctcccatagactttaaataatctctagattacatgtaatatgtaatgcaatgaaaatgctatgtaaatacttgttatattgtatttttaagtttgtatcattttttattgttgtgggttttgtattgtttctttctgaatattcttgatctgctgttggttgaatccacagatgtggaacccatgaatatggcgggctgactattatgactgtattcttgcagttcatggaatttctttaagaggatttttctaaattttttgtcatcattttattgatctccctttcattagggtcaatttttggagctttgtcagtttcttttggagatgtcatgatttcttcctgagtccatgtaatccttgtgtccttgcgttggtgtttgtgtacttgagataacaaccttttccagctttcacaggcattctttggaacagacccttattatgtagtttaacctgcaattctggttgggctagctggtaacagccttgggcaggcagagcttattttggagttctctaaatgtctggggtgctgcctttaccttgaattcacatggggcagctggctggactgagcttcacaatcaggctgagctgctggatgggcactacagtagcctcagatcaggccagggtgtgttctctgctcaagtggtaccactatttgagttctgcagttggccagggttgtgggaggggcctcaaagttaagtggagacactgagatggacaagaccagatgctatgcacaatagaaatgcatggttgaagttttccttcctgcctgtgtggggccttagggtgagttaagtgttgaggttaagtgctgtgtaaactttccctctgctgtccctgctcttcaatgaagtttgctgcattggttgtctccctgcctgggtagggtcttggggtaagctttgaggtcacaccaggtgttgttagactcccaggtgtggcacaactagctttccattttgctgcaattccctgtggtggttgttgtcctccatgggcagggccctcaggtagagtccaaggctggtcctggattgtgcctgtctaggaattcaagccaggtagcactttccacctcttccaggagtgatcagctcagctttgcctgtgagctacactgttagctggtacctctaatcaggtacctttgctgccaggtacacaaagctaccaccaagatctgtacactcattgctttgtttccacctgaccccaggtggtctagttgtgctgtattccgctgtgttccctttgaggtgagaccagagtggacttcctaagaagcatcttggaatgctagggaagctggatatttgctttcgggttctcttttccctctgtagaaaccatggtttttgggaaatcccgtctgtgaggccctgggccaacttgagggatggggtggggcaatgttgtcaaagtgagatagtttctctcaccctttccatgcggcttttattccatgctgtggaccacacaagtgactctgacttattcctaacttggggagttttcaccaaggcgttcttgtctgtggatagttgctagttgaactttttgtggggtaggggggtagtgaaacctgtgacctcctatcccaccatcttgctgatgtcgtctgaattctctttgtacattagttttgtgatctaggaactctgaactctcttattaattctaatatgtagattattctggatttttaaatgtaaacaaaaataccacttctgaataacagtttggatatacccttccagtttttatggtctatttctttttctcgacctatctagcttactagaacctccactgcaaaatagaagtagtgttggggccaaacagaagtagcgttaagggtacttcagctttttttccaatttgaattctactaatgttttacatttaaggatgatgcttattgtagattttctgtaagtactgtttatcaggttattatgaacattgtttcgagtgtatcaactaattttcctgtatttattgacatgatcttatggtttttcttttttaatcttttgatttgtgaactacattcaataatttcccaatgttaaaccaatctagctttcctagaaatagccaacttggtcatgatgtgttactttttaaaatacattatttgattttgttttaggtatttgtttaaaattttatatccatatttgaatgtaatttgcctatagtgttcatttttctgcattgtccttattggattatggtaccacagttacattatccataataatgagttagggaagctttccctctttatctcctttgacttagtttatgtaaagctgaaattatttcttccttgaatgcttgatagaactcacttgaaattttctttgtgagaaaatttaaactactaagtcaacttctttaattattataagattattcggccaggcgtggttgctcaaacctgtaatcccagcattttgggaggccaagatgggtggatcatgaggtcaagagatcgagaccatcctggccaacatggtgaaaacccatctctactaaaaatacaaaaattagctggtcgtggtggcgtatgcttgtagtcccagctactcgggaggctgaggcaggagaatcacttgaactcgggaggcagagattgcagtgaatcaagatcacgccactgcactccagcctggcggcagagtgagactgtttcaaaaaaaaaaaaattattcatacattctcatttcttagaagtcaggctgttatagtaagcttttttttctgcagatttattttattaaattttcaaatttattggcctaaagttgttcacacctatcatcttttttatttatgactatagcatctctcagttttattcaagttatatatttcagattttatttattagagaattgtgatcaggggagtttattagatttttcaaaggacaaccttttggctttgtccaacagacattttaggtatgtgaattatacctgttaattttgctcttatctattgtggtattagtatttttcttgtcagtgtcttctaaagtatgtctttatatatttaaggtattcattatttaactgatatcttggttataaataattatctctgtttttctttaattttgattttagtcaattttttgtttataattttgtttattacttttgtacttagaatcatcctttatttagaaatgaaagattaaaaaaatttttttaacattagttttatttgtatctctaactgtaatcaaactatgtctctgatctggaattttattccgacctatgatgttaagacttcaaatctatggttgaaaattccagctttatgatagaatcacctgaagtgctttttagagacatttgcccagttcccttcagttcccttccgcactcactaaatgtaggggtgggatggggtggtaaaatctcagaatatttaaaaaatatatatcatagacagttcttgatgcacaatcaggtttggaaaccactgatttaaatatatttattttccaaatagctacctgattgttccagcgccattcattgagcaagctttttccttattactggtttgggattcctcctttaccatgtgtgttaaactccagagtatgctgggggttgttctgtggctcattggttctattagcagtcttgtgccagcgtcacagacttagtgattcaaactttatgacatattttaatgtttattaatgctagacctccctcttccttattcttattttttaaaacgtatctcatctttctcctcaaaaaatttaggatatttttcatttaaacatgttattcagaacaaggttggttgtatgtgatcatcttttccatgtcatttccactgctttgttgttaagataatttcttctgtgtgtaaacttgtgttgttacataattattttctttgagtttgtgagaaatacgtaatttccttgattttctaactggctcttattggtgcataggaaagttcctgattttctttcagtagagtttttaaagcgcactctgccttttggctctgctgagattctttcagttcctggattgtgtctcttgtccttgcactgactgtgccattcttccttttatttggaatgttcttcatcactgcccacactcccacctgtacctaatgatttcttaagctttagatttctgctgaatcatcccttccccaggatgttccttcagacttttcactaggtcatgacctcctgctgtgtacttcatcacaatctacatcttctgttacagtgctctgtttcagtgcaatcactcttccctgctggattgtaaacgtcttcaggtccaggaaggttttttgttttgtttaagtctttaaaccatctgagttaatttttgtctatggtgtaaggaagggatccagtttcaatcttttgcatatggctagccagttatcccagcaccgtttattgaatagggagtcctttccagactggataaaggtggtacatatacaccatgggatactatgcagtcataaaaaagaatgagaccatgaccttcgcaggaacatgggtggagctggagttattagccttagcaaactaatgtaggaacagaaaaccaaataccacatgttctcatttataaggaggagctaaaggatgagaacacatggacacatagaggggaacaacagacactggggcttactggagggtggagagtgagaggaaggacaggatcagaaaatacaactaatgggtactaggcttaacacctaggtgattaaataatatgtataagaaacccccatgactcaagtttacctatatatcaaacctgcccatgtaatcctgaactttaaaataaaagttaaattaaaaacaagatttttgtttttgtttttgctgttgtctccttaatcaggagagcagaccgcacacaatgggtatttaataaattgcttaaatgaatgcatgaatgcttgcttcagcaacataactttggcaatgtggagattgtggtggaataggagagaagatgtagagaagccaaatgaaatctgttccaacttttcaggcagaggaggataagcatatgagctaaggtagacttactcaggatagagggtaagggttagctttcagagtgaagaggtgtgattggcatcaattaggtgctgactggatgctggcgagagagagagaaccaggtgaatgggatacctctggaggagctggccttgggaagaaaggtgagggaaaggtggggacatttgctttcctccctgtacactgtgaaggtaaggcatgagggagaatgcccctcagaaactgttgtttgcctcaaaatccaacaaagctctttttaggtttgaaaagaaagcagttcttttttgctcattcatagaatacctttcagtgagttgcttctaaggacggtagcagagtttttgctgtcattgttttgttttattttttggtttttagacagggtctcactctattacccaggctggagtgcagtggcacgataagggctcagtgcagcctagacttcctgggctcaggtgatccttccacctcagcctcccgagtggctgggaccacagatgtgtgccatatgcctgactaatatttgtaatttttatggagatgggatttcatcatgttgcccagatagttttaaactcctgggctcaaatgatctgcccgccttggcctcctcccaaagtgctaggattacaggcgtgagccactgtgccctgcccttggtagagttttgaagacagttgttatgatgttaagtcattgcactgagtcactaggccatcctttggctttacaggacataaaatatgggagtttcatcaccagacagtgggcggtactgggtttcctactgggtggacagtcctgctagtgggagagttctgtccttagtctgtgcccttggactgtagatatagacatagaaggtcatctccctttatttcgcctttctgccttcattgtcactggggagacagtccccccaagtcttcctgtgtgtgacgctgtgcaggtggtacatagaaatgcccatcagtgatacttattttgatgctgctgtgatcctgagaattttcccacttataggtgctctctttgggatatctgttggcattcaactgttttcaacagaagtctccaaaattggtactcatccagggttatgttaactgcccagtgtaccgaagggtgatgtggacaggtggaaaaagactgggttaatctcttagtgagactaagtgtttttttacaagtggttggttgtctgagggttagaagacttagaagagttttacattctacattgaggaagtaggcactcacccatggtgggtggtctgatgtccttgtttcttcagtggagttcttttttctttttttcttttctttcaagacagagtctcactctgtcacccaggctgagtgcagtggcacaatgtcagctcactgcaacctccgcctcctgggttcaagcaatcctcctgccttagcttcccaagtagctgggattacaggcatctgccaccacgcctggctaatttttgtatttttagtagagacagggttttgccatgttggccaggctggtctcgaactccgacctcaggtgatccacccacctcggcctcccaaagttttgggattacaggcgtgagccaccacacccagccatcagtggagctcttaatgtcatttagaacattattattgttgcagttgaactggagatggtaggaaatagtgaagttctgcagttgttgaaacaagatgctccctcaactgtgctgttccccacagtagagaggtaagacactccagaggagttgatggtcgagcagctatctgatgcctctaactgggaatggtctcacagattccttactgaccttaagcatcagtagtttgcttcccaagcttgtggccccaaactaaatctctttaaaaaaaaaaaaaagcaaaaaacccgaaagtacatgattagatcttgcaatacaattattgacaatgtattttctgtagtttaaatgaatcacttataaaactttagtgaatgggatacgtaccttatgtggttttagaaatattcgtgtgcaaatgggcagaatgaattggagttcaggtcactttgccaacttgtgagatgtcactagatttcaatgtatgtaaataaacaagctcgtctttccaaatacaactgcacttgttatttccaagagtctttcaacaaatgggataggaattcacaggcagggtcccagtgcctggttgaatctgactccccctgtgtaaccttggacccatcgctgaaaccctatgccttcgtgtcctttttgtaaaatatggacaccatcagtactcaggaacaccatgaggaccaaataggtttacacacgtaaatgcatggagaacagtagctgacagtgctcaagtgctcacattagcaaaatgaagtgattccctagtgaatcacactattacttaaagttggatttttttttgttttttgaaatggagtcttactctgtcgcccaggctggagtgcagtggcatgatctcagctcactgcaacctccgcctcctgggttcaagtgattcttctgcctcagtctcccaagtagctgggattacaggtgtgtgccatgatgcccggctaatttttgtatttttaatagagacaaagtttgaccatgttggccaggctggtcttgaactcctgacctcagatctgcccacctcggcctccgaaagtgctgggattacaggcgtgagccaccacacccagccaaagtttgatttttttaaaacttaaaagtcccaatggattcagatcattgagatttgtaacctattattaacatacattttctggctgggcatgggaggcagaggttgcagtgagctgagatcgtgccactgcactccagcctgagcaacagagtgagactctgtctcaaaaaaaaaaaaaaaagatatattttcttcagctgggtgtggtggctcacacctgtaattccagcattttgggagtccgaggtgggtggatcacttgaggccaggagttcaaaactagcctgggtaacatggtgaaaccctgtctctactaaaattacaaaaattagctgggcatggtggtgcatgcctgtaatcctagctactccagaggctgaggaaggacaatcgcttgaacccaggagatgaaggttgctgtgagccaagattgcaccactgcactctagcctgggtgacagatcgagactctgtctcaaaaaaaaaaaaaaaaaaaaaaaaaaaaagacagatagttttcttcattaattcgggatatatattgtccaggggagttggggaaaagcctagacttaagacctaacacactgactttataactccagaaagccacatgaaatgagtttggtgttcaggtcaggaaaccaaagtgcaaaataagaggaggagctgtctgtatcctcttttgccttgtctggaggtgtgtaggaggctgagaatggtttagtgagcacattgctatacatcagtgatctcttccctcctgtctcagatactgactctgtgccccggggtccctctccgtgaagcaggagttacacgctcagatgcctgggggggtgagacagcaacataaatgtctttcatgggccagatggggactgtcaccagcagcagagcatgttcagccactactcattgccaagcagttgtttcctgtaggaattcaggcccagtgttccagaactcctgatttttcaagaagagacagaaatctgtactgcatagcccaaataaatcttggattagatgctggctgcaaccacactagtttgcaatttttgtaatgggaagaaaatatttatgatctatgtaacacacaaatgttggtgttaaacagatacttttactctagaatctttgggtaaaatgaagtctgatgaccttgttaaaacatattatgtaatgcttgactttggtcattcaggaaatacctactgtgtgcgttaacacgtaatttagtacatattttctctttaaaatgagcagttgctacaaatgaaacctggcccagaagtagcagattgtcattctgcaaaatatttgggagacctgtcttttgccttttaggttttgttagtttgatggaggtaacgttacttttggttcttccattgtatttaattgacagtatcatcttctaaagaatttcagttttacagattggagtagtgaactcagggaagcattaaaaactagtagaaagatttgagtagattgggcaacttggcaccaaggccactggtagggacgtgcacactcttttcttaataacttagaggtgatgaactcctgattgattgcctcagctaacagatatttggctgtcactaaaaattatctaagttgtattacttgaaaacttagaatttaaaagtgttaccatagaggcagatgtgcctctagaattacctgtgtccagaccaccaaaaatgaccagacattccccttgcttcatatgagtgactgctacttcttgactttttaaagagttagctttggccaggcacggtggctcacaccggtaatcccagcactttgggaggccgaggcaggcagatcacctgagatcaggagttcgagaccagcctggccaatatggtgaaacccccgtctctactaaaaatataaaaattagccgggggtggtggtgcgcacctgtaatcccagctacttgggaggctgaggcaggagaatcacttgaacctgagaggcagaggttgcagtgagcagagatcgcaccattgcactccagcctggatgacaagagtgaaactccgtctcaaaaaataataaaagagttagcttcactttgtttgcttttcctatcttccagataaaattatcaagagattcagtcacagatttgcctctgctttcagacactgccaaatccagagcaaaaccatacttctctgaactttccccaaaatcatctaacaagagcccaaattccctcctacagctcttttgctcagagccaccccatagtttcccacctgctggctccctgattacaaagagtcaataaactcaacctggtactactgtagtctgctcctggtgagctgtggatgaagggtattgctacctaggtaagatttgatgatattattacaccattatttacttgttggcatttgtgaaatattaaaggtagcagggcctatcataggaggaaaggaaggttgatggtaaaaatggaatgatctatttcagcaaaagctgcctaagaaatcgtctccctcagaaggttatgtatgtgcaagctcttcactccctggaagagccagtgagtcactccaggcagtcttgcaaacggtcgtttgattcgagttacagatagtaggaggtgaccctttgaaatctatttagaaaaagttctttctaaaagctatcgattgtgctgattatgatcatagcaggtttcaacctgctgtccaagtctggaactttaggcaagttaagatcaacaagcactctgcgatcgagtttcatttaattagagtttgctgccaagtcaggttttgaggccaactgcatgccaggcgcctttcaatggttgtctgtctgagctgggggaacgttggaggatgctctgccctttctccagtattaaccttagaccaaatcccaggggcttgccctgagataagctatctctacaccactggaaagagaatgctttgctgcaaatgcatgaaggcagagcaaagatgtaaggcaaataagtgggaaatccagttcggtaggcttttcccaaaagcgagagaaaagcgttcgtagtcctttatcaggatggtgggggaaaaagaaaaagtaagctgacttttattttttcaagtcactttcctaagaaacttgtaaggacctctctaaggcactgctatctgtctttgtagggcaagcgtgaagctttcccttgccagctttgtgatgtcattgaattaataatactgtaaaggctagatcagaagtcaatttggcagctgtgcctttagggaaatttttgggagagtgaccttccatttctaataagcatgttattacatttagaattaaattactaagagccaagctaccctcttgaatttgctattagccattttttcccttttatttttaatgaactagaacaagttgaagccagttgtttctattagtaatagtacacagtaagaaaggaacaaaaaatcttttactatcaggccctttatgttggacaagtttagctcttctaaatatcagaatttgtgaaagacttccacaaagtctatttcttttttcttaacttgggtagagtgggagaagccagtgggttcctttcaccaattttatatttgaatgcctcctcatgtgtgagttttcttccttaaagtgagaaagatcatcttcatttcaacgtttgtgtgattctgaaattcatgtggaatataaatgggccccaaagtccaatggtatattctgtaacaatgcacctacagagtatttaacccatcaaccactagagcccaatttaaaacaccagtccttaaggcagggtggtacccgggctgatgtaaatgaatagacacccagagggcagttgagaaatagctagcaagcaagttggatcaattttaatatcaaatcacactctcaaataagacagaagaactttttacgaatgatgttggcagagagagatggcagtttggagccaaaatttaaatcccacactgtaaacctaaaacaaacataaaagggtgctccaggttaactaaagatgacaaattattgaattgtggaaaacatagaaggaaaaaaaaaagagagtatgttcagatatgaagcaataaaccaagtcacaaagctggaaatattccctcattaaacaatacctctttaagagcaggggctgtcacaacaacttggtaatattccacacatttgctaaggtaaattcaacaatactatacgtggaaatgctgctactggggatcccggttaccccaaaagggactctttcctgtttggcttcatgaagacaatacataaaaccaaaagtgagtgccaagcagtgcagactttattcgatggtcatggaatggagaagtgggagcgtagcttgcatatcaacaactcagctcttgagaactgggaagttacagatataggggattcttcattttaataagcctgtaatgatggcccatttgtgtctgtgttcacacgtgcgtctctgagagacagagacagagttcactacatgtgggtatggtatttagattcctctattggaatgcaggttccttgaagctcaaggatattgtgatgcacaggtgctctgacccaggaacacagcctggcctgcctatcagatacggaccacaggaaccatctgttctactactcttccacacccaaaaaacctgccactgccgaggctacccctaccaagtctaggtgtgtacattagcttaaaataattcatggtattattaaaggtcaaaattatttctctctttgtacctttattgattccgctgatattcatccatttgcttattgactggtgttttcattgtggtagagccacacaatttttgtttttgattgtcattacttatatagatttttgagaggaacctaagattgtttttttctttcttgctcattaacttgtaatatctcaaatatatacttaataaagtaaaaattgacttaagtaaagggtgagaaaaagattatgaacttaagaaggattaaaaccaatttgcatagctctggagagacggtctttccttgtattacttggggaaagcaaaaattaaaagagatgagatctattatctgaatcatggatagtgtgacctacccagagtacctactttttaaccttccagtgggtgttgaaatctgattcagcacattcttggagagtgatgagtaaatttgttgttatataaagatttttcaaaaataagcatcggattcaaacatgagtagaaaggatgagatgttaatttaagtgattatgggaagctgtgatttatacacatgaaatcattcatttagagatgggtagtaagaacaatgaggatcttagggactgagtatctgtttcctaggacactagagacagcattaggtagtgattaacttaagaattctgaagtgtgattgcctagatttgaatcctggttctagtcctttctagctctctgaccaggagcaaattacctaagctgtctctgcctggaccttcccatctgtaaaatggtgttaataataacatctacctcatagcattattgtgaggataaaagtgagttaatatatgcagatttctagaagagtacatagcatattgtaagcgctgttatacacatttactctcattacttgccatgatgagtgtgcagaggttaaccaggagacaaaggaagctcacaccccagttgttttgtgggctacattcttggcgatgttttatcgttgcccctgataatttccccatttttaagaaaaaagaattcataggcttagcatgtggttgatttaagcctaacttttgactgattctatatgggattctgactctctgattaactttgatgttctaactttacctagcgaatattttttttctttattttatcgaacagggaagaggtcttttgatttttggattatttggtataatattatattcttgaaatcatcctgtgactgtcaaaaagctgactgtaaatgaacagtgagccactgcagacagaaacaattattcagggaaacataaattcataatcactgggcctaaaatgaattagtgagtaatccaatctgggggtgagaaatgagcccttggcaacattgtttttaggctacagatggtccttgaaacactattagccggtggatctgagcacctgaaaggtttaaggaagcctgggtctgtgctgaaggtgtctttgggtaaactgtcatatttgcatgcagcatccttttagaatatcaatgagatctttatatgcatgtgttatgtcatttccaagcaccctgtcagtaaatggatgggtggcatcagcccgaatgcaaaggaaaggggttcatctggaactgaaatagcagaaagggagcaggagatggatatttgatggctgcccttccctgtgcattgtgtgaataccactaggtgatcatctcagggcacctgcacaggcatctgaaatgcagtgtagaggctctgcttggcagatttgaggacattaaggctcagataagataactatcttggcccagatcacatacgtgggacatggcagagccaggattcaaattcaattttgaataattccaaagccaatgcagcacctgaatgcgtaggtttaataaaattcagcctaatccttctgaaagttaattcaatgcaggagtgactttagcatcaatattaatttaattttctttcttataagttatttcaagtttgctgtttccctacagtttgaattgaactttttcttcgattgctgggcaaatctcatttatgagtttgcagatgggagaggtattctttaagtcagctttgcaattaaaatgaactagagtacaaatgtctcaatttaaccttgacacctgatgtaatattcacacggcctcatcatccatcatcttttgtgtgccactgaggtgcattgggccactggcttttatcccatgattgtagagttgcatccgacattatctgtttcaaggatcgcagaccagctactttttctgaactagaattctctttgttctagacctgttgtttgggtgatatatagagatgaagcaatcttcgacctgattactgtctggctatagaactttattgtatcccatagtatacaggactgctttgagttttgcctctattctagccatttgctgagaagaaagacatttgtggaggtctcctcaataggaatttttattaaccataagtgatttaaaaccattgtcaaacctgtaacttttaagagttactgtgacagaatgaggggaaaatattctgaagtttaattagaaactatagaaattagacggccaggcatggtggctcacgcctgtaatcccagcactttgggaggccgaggtgggtggattgcttgaactcaggagtttgagaccagcctgggcaacatgatggaaccccgtctctacaaaaaatacaaaaattaggctagtgtggtggcaggcgcctgtaatcccagctcctcgggagcctgaggtgggaggatggcctgagtctgggagggcaacagagccagaccttgtctcacaaaaacaaacaaacaaaaactgaagaaattagaagatgaataatggctgtggtaatttactttcttgtaagtaaaggtctttacctactttacaagaaagatctttacttacaataaaataagttacctgtaaatggccttaaatattgattaggttgtaagagagaatatgaaattagataaaatgtagcaatatttgatgtcatcatttccttcctcacccacgcctcttctggagtgggcagttggtcacatgatcttgcccctcttcagcgattgcactgtggctgttactgtcaggagatgcccgtttgtaggtctgctggtagaagtctgagatagactggctcagagacaagctgtaccagtaagaacgccctaagaaactgttcaagccagagagagcagttgccagcgggcagtggttactggagctggaatgccagatgaagtctgatgggtttggctctgatgggtcttgtgcatccaaaaccaggtagccagaaggagccagttgatcaagcagatatagaaagatccccagagagaagcagaggtatcatccaagagatgtgaaagatttttccacatcccaattgctacctggattcctgagacttggttttcattttcttctgtgaatctagtgaccatatacctttttccttgcggtaacatgggacataactgattttcttgaatgcgagagagctttaactaaaagaagattgacatttaagacaaaatgaaatattgcaaatagtcaagaagatctacacttgggtccagaatgttatagaattaagaaaataactttctgtggcatcagagattgaaaaaaaaaaagccgtcgagaccaggagcagtgtggctgtgaatccttccagagcccagatgtacaaggcagcagaagcaacaaaggctgtggccagcaacgaaggcagagtccccggtaggcggaggtccccgtgcacagtgtggtgcagcagtgaacccaagattttccttcacagggcaggggaactatttcctaataagcattggcattcaggttagtaaccagttgataggattatatcaacctgtctctaagtcaaaacagattattcaacttttttgagtggtattttagaatacataggtcaaaggtgggcatggtggcacacacctgtagtcccagctacttgggaggctgaggagggaggcgtgcctgagctcaggagttcaagtcagcctgggtaacatagggagatcctgtctctaaaaataaatattaaaaaagaacatgtagatcagaatttggatgacttttttttcctcaggtgcagagatggtaggggcatactttcaatccctggtacatgactttctttctggtctgcttagcaatatgtgtgaaatgtggccaaggatatgggacttgttgtgcctgtgccatgtaagagcctcatccaaataagtctgtacctctgtcttaaattccagaaaccatggatgcatgtaacaagcatattgaataggttctgtaacccagagcttatttgtttttattattattattattttagaggtgggggtcttactatgttgctcaggctggacttgaactcctgggctcaaggaatcctcccgcctcagcctcctgggtagctagctgggactacagatgcacaccaccactcctgtctcagagcttgatttttaagccttatatatacttataataaaatatgttcataatatattttataaaatgaatatataaatatatatttataaaatatatataaggcttaaaattttaacgttaagaatgctgtttctcttttttagtttctactggccaatggaaagaacatcaagggattgcaggccaaatttataaaatgtttacccagggcaatgctagtttactttcatgtattcaagtattgtcattgtataatttaggtatttatactccccgggaaggtgtttcttggaacattttaattattgaatcttaagaatattagtttttattaattcgtcatttatttgtttatttttattttttatttttttgagacctagtcttgctctgtcacccaggctggattgcagtggcacaatcttggctcactgcaacctatacttcccagttcaagtgattcttctgcctcagcctcccaagtagctgggactacaggcacctgccacaatgcccggctaattttttgtgtgtgtgtgtgtatgtatgtgtatatatatatattagtagagatgatgtttcaccaagttggccaggctggtcttaaactcctgacctcaggtgatccacccacctcaggctcccaaagtgctgggataacaggcgtgagtcaccacgcccggccagaatattagtttttaaatgaatgattccaagctaagttttgctattggaaatataggagttaattatgacaattatcatttgatgttgtgggggctaaatgtgggtatttttggtgtttttccttttttttgttacatatgttaaactctgagtcttttgacaacaccaaaaggcattatgacaactgtatatacatttaactttgctttcagggagactagttcaaggtagtaaaacctcaaaatggatttgcaactgaattaaggttttctgagtagagataaggctgaggtagccaaaactacttctgctatctctttagaaaaagtacttttattcagtctgttcttaaaagaaataagtgtggttgttttcttttttaccataagcagaatgaaaacaaaattagaagtcattacttttttttgccccagcttactttttgttatggaggtaaaaattacataacataaaactaaccattaaaagtgaacaattcagtatatttagtacattcatgttttgcaaccaccacctctgtctagttccaaaacattttcattacccccaaattaaaatcctgtatccattaaacagtaactcaactctttcccctcaaaatcaccagtctgttttctgtctctatggatttacccactctgattatttcatgtaaatggaatcatacagtgtgtgctatggtttagatatggtttgtttgcctccaccgacacacacatgttgaaatttgaaccccagcatggcagtattgggaagtggagcctactggaaggtgtttgggttacgggagtggatccttcatgaatgtcttggtactgttctcccagtagtgagtgagttctcatttttaggagaatggattaattttcatgagaaaggattagttctcacgggagtcagttgttaactcccttaagacatcctttgcatttccctctttttgcacatatctgtttccactttgaccttctttcccactctccatctcatgttgtgatgcagcatgaaagcccttgtcagatgccagggacatgtccttgaactcctcagtctgcgaaactgtggcctagataagcctctttttttttttataaattacccagtcttagatattctttaatagcaatacaaaatggactaagacaatatgtgtaaccttttatgcctggctgctttcacttaacatctaatactgctttcttttgtgtttgatttttttttctagtgtacccttttgattcccttttcactgctttttctgtatactttttagttattttcttactgatttaccatgagtattacaattaatattgcaagtttatagcattctagtttgaaatggtgccagtgtagcttcaatagcatataagaaccctgctgctgtatagctctgttccccctttatgttatttttactaattttatctttgtatattgtattaatatagatttatagttattgttttgtgcacgagtcttttaaatcacctgggaaaaagaagtggtacaaccccaaaatacgtaaataatgaattttatgtttacctatggttacctttacctgtgattgttatttcttcatatagctttgagttcctatgaaatgtcctttcctctcagcctgaagtatttctctttagcatgtcttatagggcaggcctagctcctttagctactgtatatctgggaatgtcttcatttctcctttattttagtaattttgccaagcatagcatttttggttaagtttttttttctttcagctttttaaatattttaccccattgtattctgggctccatggtttctgatgagaaattggcagttgattttattaaggattgcttgtgtataataagttgcctctttctttctgttttcaagattctctcttttgttattggcttttgatggtttgaatatagtatgtctcaacatagatctctttgagtttatcctacttggagtttgttgagctttgtggatatgtagattcatgtctttcatcaaatttgggagttttcagttataatttattcagatattctttctgcctctttatctctctgtttttcttttggaactcccatttgcatgtgttggtatgcttgatagtataccacaggtctctaaggctctgcttatttttcttcttttttctttctacttctcagtatgatttaacagtatataaaatatgcataggagtatcttcacatttgctgagtctttcttctgcctgctcacttctgctattgaacccctttagtgaattttttacttcagttaaacttttcaatttaagaatttctgtttgattcgtttttataatttctatctctttactgatattagctatttgcttatacattgctttctttatttcctctactttttttgtccatgtttccatttccatttaagacagttaatttaaagttgttgtctagtaagcccagtgtttgagcttcttggggaatagtttctgtcaatttatttttttcctatgaatgggacatacttttttgttttttggtatgccttgtaattttttttttgaaaactagttgttttgaatattgttatatggtatccctggaaatcagattctctcccctaaccacggtctattattgttgactcttgagggctgccatctgtttagtgatttttccaaaggttgcattctttactgtgtatcattactgaagcctctgttctgttgacatatggttactgacatttccattttgttatctcattggtcagccagttatgtgacagaggatttccttaaatgtctggaaccaaaaagaaaagaaaaaaacaaaacaccaaacatttttctagtctttgcagcttagttctgacctaagtcattccctcaatgctaaaccaggtcacccatgactctgccttagccttcacctcctgctgtgcagaacccacagatccaccagtggggcaaacctatggtcctctcaggtcttctccaagcatgtggcagtcctaggcatggatttttcaccctagcttccacagcgtatacattttttattccctctagaaacttccttcttagcctctgccttccctgctttttggtctgtcccttactagtttttattccctctagaaacttccttcttagcctccaccttccctgctttttggtctgtctgttgcttccccatccattgtccgaggcataggtagtgtgtgtcttgaaatctttcaacagatgccactgctgcctgaaatgccactgcagcccaagggagcaggaatgaaacaagtaccagcctctgtgcagcccctcagggaacagccaggcaggtcaaaatacatacctgcagtattttaagaataaggtttactttagctccctgataccagcaagccacactaggagggcaggccaccatccccatggctgccctatggtgctggggttagagcatggtgggcaagtgagagaaaagaccccagcgctttcttactcaaatccagctgcctttttcttcattcggcatattccttactatcataggtttttaattaactcctagagttctgaaaaagctggttgtgtcagtatttgttagcttacttattattttagttcagggaccacttgtttgagtgccctactccaccattttgtatgatgtgatttggtagttccttctgaaggaagatagtcccactgcatagaaatctaagtatgaatattttcaatgaaacatgctgttattcaggcagccttttctgcctgaggttattgaatcagacgttctgcagtctcttgccctggtgttgagccctgggagctggatggagtctgaggtgggttgttctcatcctcttcccccttgctgcaggttccctctctgaatttcctggcacaatgccctgctgtcttaaatgtttactaatatttgctaaaaaaatgattatttcagtttagctatataaggtgaaaatggtttcccattttcagaagactggtttaccaccttttggctggcacacctgtatagctaacataaatgtgatttaaaatttaaatgaatttgcggagcctgaaagagcctcttctttgactaccctggagaaaaacaggtagcaacactttatgtcttagatgatgttcctcctgatgccttaattagaaacttgtagatttacttgcagtccagctatgtgctcatttgcacagtttagtctaaaggctttacctagagtcacaacttgattgttgtccaactcacactgggccactaacactgcaagcttgacctatatgtgaaatcatggagctggttcctcatcaatttcatgactgaaaagtttgtttacttcctttcttcttgttggcagttctgttaagtgtcttgcttcagctgtgtctgcagcctctggacaggtatagtggagcagtgttgcgggaagtcagggaccccaaacggagggaccggctgaagccatggcagaagaacgtggattgtgaaaatttcatggacatttattagttccccaaattaatacttttatagtttcttatgcctgtctttattgcaatctctaaacataaattgttaagatttcatggacacttatcacttccctagtcaatactcttgtgatttcctatgcctgtctttactttagtctctcaatcctgtcagctgaggaggatgtatatcgcctcaggaccctgtaataattgcattaactgtacaaattgtacagcatgtgtgtttgagcagtatgaaatctgggcaccttgaaaaaagaacaggataacagcaattgttcagggaataagagagataaccttaaactctgaccgccggtgagccaggcggaacagagccatatttctcttctttcaaaagcaaatgggagaaatatcgctgaattctttttctcagcatgggatatccctgagaaagagaatgtgtacctggaggtaggtctctaaactggcccccctgggtgtggtcgtctcttatggtcgagactgcagaggtgagatagactccagtctcccatagcgctcccaggcttattaggaagaggaaattcccacctaataaattttggtcagaccggttgatctcaaaaccctgtctcctgataagatgttatcaatgacaacggtggccaaaacttcattagcaattttaattttgcctcggtcctgtggtcctgtgatctcgccctgcctccacttgccttgtgatagtctattaccttgtaaagtacttgatgtctgtgacccacacctattcacacactccctccccttttgaaactccctaataaaaacttgccggtttttgcagcttgtggggtatcacgggacctaccgacgtgtgatgtctcccccggatgcccggctttaaagtttctctcttttgtactctgtccctttatttctcaagctggccaacacttaaggaaaatagaaaagaacctacatgaatatcggggcaggttccccaatagagcagcgtactattttgctcagtgggggacactgtaggtcatagagtccatcttggatgggtatcaacttgaagttagtgtctgcctgcctgcctgtctctcatatgtttgttcggggggcctatctgtatatatacttttgtcttatttgaagattccagtttttttcatagagaggcagtaaaagatgcccaaggatgttctgactccctttcaacttatccttgtaaggcaccatagagaaagtatcttaggtcttttgttttttcagactgtggcatcatcagcttttctccaaagtgctggctgcctctcacaacatcactgcagtgtgtgttgtcttgctggcagagtctttccatttctctttggggtgggaatggaggcaggaagatattcttttctagcacgtttggcaaggggagttcaattcaaaactctaaggaattggtttttcaaatctgtgccacctttgttctttttttaaaaaaaggacatttaatatttctcaagtgcaatcttctcattctggctgctatttattttcttcattctctaaatttattctgtcagcgtttctgaagctgcctctgctggttgccaggcagtggctttactccttttggagtaaagatgaatctgaccccagggtaggatcaaaatctgtaccagtaggtcccagttctggctttttgagctaatatagtcaatctaatttcccttgcatgtgatagctattaaaacattttaagactgtgaacatgcttatttgagaccggaagagactgggtcacagaggaagaaggaggcaattacagagtgggagtgggcaggctttggtggtttggagactttgggagacatgaataatataagggattggtggaaaagagggagggagcagggtagagacaagaacctttggtcagcttgtattttttagggtcagtattctctggcaataatctctccagcttctttggaacgaaaacatgaatagtgtattagattaaaaatcacaggactcccaggctagcattaattctccattcaaccctgcctctttcctaccatgatggacaaggcaaggagatgagggacagaatgctttctcctccgcctctcactgttcctgtgattttcagattgtactattagcagagttctgcagacactataacagcgaatactgatgatcttctataaatgtatgtggaattctatttgatgattcttgtttaacgccacagaaattttggataggatacaagaagattacccatgatgtggcaaatgagaccagttgggatagctacaaagcagagactctgacttctgtatactgcacaggaaatggattctcctaactgtcctcctgtcatgtatgataccaatgtaattatagaaatagaagtcaaacatattttaacaaatgtggtactggaaaatcatacagctctactggctaattttccttaatttcatgatgttttacaaattggcatttattgctccctgtctacgctgactcgtttctctactaagcttgcttttttcctaccccagacacagatctgatcataatcttccatatatcccacccaaacagctattggtgcgtaggaaaaatggtttaggctgataaagaatgattcacggcaatggaaagaaagccagccactgaagtaacttataaaatgagtccagtaattcagatgtatttataattttatttgcctgtgtggtcctagttagacttggctctgcacagggaaaggaggggaaaaagaaacaattttaggggaaaaagtgaaagatggtacaaaaatttggtgaaaattacatagtccatatgccgctttgtcatcattaagctaatgttttcaacaagctgttttttgtggttcagcagaggaaactcggcagtgtgattgcagtcatggaatcctacctggctttggttccaccatggctacatcctgccataaacggagacttcgggaaggtctaggaaatattgtggtgttagtgtctttagttaaaagccaaccattcaaggttgtctggcccaaagtaacgtttccacacttagagaagccacccaacctctgcccctgtttaggctagtgtgaacaaattcatcctggccatgttgtcttctcagaactcctatgagggtccagatgtgtccccccccgaaaactaaatctataaggacctttggctcttttagctgctttattttttgttttcaaccatgtatgaaagtgagtgtgcaaaataggcttttcaataaattatgcatccttcaataatatatcgtttccattccagttagctttaggcccccaaaccagatcattaggtctctggaattggctgaggcaagctggcttttatgtctctgatgcctcttggcccatccttttcaccaagagaggattagaatggattcattgcaagggctgcagggaagtggtgtatttagtgctttgcagtgcctgccacagacttgagtgtcaaattcctcctttctctaaagagcataaaattcccatcagacttggagagctaaatgcaattgaaacattgaggggaagagtgttccttggcacattttccccacccggagatcctcaacagtacgtttcctcccgtgtagtgactattaggagtgcaaaacctgaatactttttcaaaattagaatgaccacaatagtaaataggacagaatgggagtggtattgaagtaagaatttgcttatagaattaaaccaaatccaaattatttctcactcgccttcaaaagataattttgagcttttgaacatagcaggtttgctggtcgtgctactgagtagtttgaaagcaaatttcagtcaccaaaaggacgtaagtctagaaggaccctttacttctttctgttgtctgttttaatgggtgcattctggaaccaaatgcgagtcatcctgttttatctttttccctttgcccctaagtttcagttgcttgtctgagtgtacagctagattgtttgccttttgtaaaggtgagcatatgaagcagacatggtggagccttggggccctagtagtgcagaatttttggaatggcagcaatgttacctctatagtgtcagctttgttctttggatttgcattgcatgacccgtaataccaggtggaggaaaccatgttgaatttctctgggggccactgctcagcagttgtcaatctttaagtgcttaaaaatgtctagcattcttcctttccagagggcatcctgtgtttacacatttacgccgtcaaaatcaagcctagtggatagaggagttgtagaacagggcagacagaatcaaatcaggcctggtgtagaggtgtaccttgggaaatacctccagttgttttcagacacttgcaaatatgtgtaaataataagttttatcagatagctttttattttaatattttgggaaatgggataacacaaccttttcttgtgaatatcttttgttcttttaatagaatgtgaaatcattacactctaagtagcaagacaagaatatcatgtaaacatgttctggaagatctgggctttaattttgttgtgattagtgtatttcagagagtgaacatgtttggaagagtattgaaaatactctcctgggttgtgccggtgttcatgggttggacaagctcacctttgacaggcaggcttggatgctgctgatggagttacagagagggctttgcatgtgaaaaaatgacattttaagttgaaatgccataattaatcatttccccctttgattcatgttatagaaaccaaattaacataattaaattatttttacaatcatatattaatagaaatgaaaaatactcaaggtattggagaccccaaatatcctgacttgatccttattctatacatgtcaaaaatacttacatgtaacccataagcgtgtaaaatattgtatcttaataaaagaaaaaaaaatgtatatgtatattttaagaatcagtagtgccttgaaggataaatattctaataggtaggcagtggttaactgcaagtgatctgattggtggtctggatcagaaaattggaatttcaaattagagaatatgtttctgacttgacatcataagcatagatgtctttaaaatgcttttaatattcacaggcatttggggaagaatgagctagattcttttttccctcatctagcttagatatttctacatttgctatcctcagtacatcatatctcagtagctcttcccccggcttgagttgtcctggaaaggtgcagacctcatgagaggtggaggatggcagggaaataaccaggtcatctcaggggtctgcagaagggtaacatctaattgagttctgagaccacacgtgaactctgcctcaggacattgcagcccttgtcctggccacacactttattgcatgtgagtgccccacactacccaaccagctcaaccagcttcactctgcctcacgagaaagctcttattttacctgtgccaaagtaaaaaaggttgaagtttgccaagtggaaaggaaaagacagacaacacattaagtgattttttaaaaaaaatttttatatattccttctggaaactgtttttgtgtttgacttgatgaaagtatacatgtatacttgtatacatgttgtagaaaactataacagagaatacaggccagtattctctgtagtcgattaaaatctcttattggtagagttattcaatagggaactcccaatttgacaagttaaaactcctaaacaaaaaggtgtcttatgttttgtagtcttgctcttttgaagggatttaggaaacctctaacttctttttttgtttttcttttcctagtgcctttgttattgggaagaggaatttttattttcttttccagaggaagggaaatctctgggccagatcattgcctgggacaggattctcttgctaaatgccctgcacaccatcttccatcctactgcagcagactcaccttttaaaaactcttctattgtggcatcagcttagtctagaagtctgctgcccactgtggtctctgctagccacatggggctgtttaaactcaaattaattaatgttaaataaaatcaaggttttagttcctcagatgcactcaccacatttcaagtgttcagtaggcacctgtggacagtccagaacatttcgagcatcatagaaagttttattggacaacattgattagatccataatggttttcaatttctttaagactttaaatgtgaactctttagcctggcctgtaaacctgcccaaattttgccatctgtagatattgaatataatttaccagaagggagaatgcagaaggtagtcaagaaaatccatgttggtataactcatgtgagacccgggtggtggtggagagacatttaattcccttctgaagaaggcatggcacttggacagacaggaggtagtccaggtagctctgggataatgtgtgaacatgaagattaatttgaggagtatagaagattttgatcttggtgaagggtaaggtgaatagaggacaacgggagagagataggtggcctgtattctctgttatagttttctataggggactgtcttctcatggtcttcagcctgtgtttgaattcaaacatttcagtctcctttgtcctcaaaaagagaacatgaaggagtggattcactcatggcaaagcagatgggaacaggggtgttagtgaatagtgtggacttcagactttaaggaatgatgatgagagttagtggtccacagattctggaaggagcactgtggtgatctggtgcgaatgagagggggtgggggatattacagagggttatgaggcaagtaatacctttacagaaagtcaaattttaatgatggaaagaatgcaggaatgtaagaactttaagatgaacagaacatgactcatgatagctcagacgacccagaagatagagtggataagtaatagaggtgcaggtggttcttgatgacaagaacttggccttcaactctgtgtccctagcacctgtcaaggcacttgatgattaatggattctgttaaacacttgttgcctctgtggggaaagctgggctcaccaagctagtagttgtggagtatgggggaaaacagagttctgtgtctcaggcggtaatttcagcaacaagtgaagaaggcagataataggctggggagaagggtagaggcacttagtgacaggctggcagcaggtggaggatatggccgggagtattgctgagtttataggattaaaaggccccactggagagctgctgagttgattgaattacctagaccccagatgccaaggtaaatgccactggggcagctctagcacttttcaatagtgctgcctgtggccctgagagtgtgccagcaggtggggttcttctgaggcaggagggcaggactggtggagtcaagcagagggagccagctctgcaacacagctcctgggtggcagcttgccttccagcacacgtgttatgcagcagagacctggtaaagccttgtttggaaagacaactttggcagcaggatagctggaaagccctaccttggaaattagtcctggggttgaattgtagctgtgccactcacttgctccgtgaccttgggcaagtcagttcacctctaaggcttcctcataaaatgaggagaataattcttaatctccctgtcactggaggctgctttgtggaggaaagcgatgtatgtgaaagcatgcagtaagctgtaacatgctacaaaaatgcaagttatttataagttgggtttcaggggcaaagaaagacaactcagtgaagatgtctttacagtaatcactgtgagttaatgacaacatgaatcaagaatatgataatggaaaaattagggagacaacagaaataaaggcttctagtaagaattttaaaattacacttggaaaccaggtaagcaatgggaggaaggcaataggatgaaggagaatgaaggctagtaaaagatagtaggattctgggtttgaatggttgagagaatggtggcaacattaacctagaggcagaaagagggaaatactggaaatcaagatgataggctttgttttggacttattaaattctctgtactactggaacatcctgataaaaaatggtaacaggacattctggttgtaagcacagtgaaaaaattgagactgagtttggaagccagccaccagaagcagtgtttgaggttttgcaacagaatgttatcacccaggcagccatgtagcattagaagaaggccagggataaactttggggcagataatgcgatttgacttccttgggtgttaggtcttcctcaaggtaagcgtagttttcttactgcttgtatggtggccatgacacttatgactgtcagcactacatgtttatgtgttcatatttttcacatactttcaattcttggagtttagggattgtattaatcttgtataccatagacacctgaacataagctaaatgtctactagcacacagtaaagatttgaatatgttattttgaaataatgaatcagtgccctaaaacaaaggtggtcattgttaaggatgatctggagaggcctgggcgaaggataccaccctgggcccattccaggttagtgacatgaagagaccagttgatattgtcagtgtctttctcctttgatgctctatagattgagttgagaacatagattgttgattgcggattaggaaaaataggaggtcaaggggattaagacagcatcagttttcatgaagttcaaggtagttggagaggtgggttaagctgaggaataccagtctagagtgattcacagtagcttctagaacaaaacacttttgcaaaacaagacaggtggaattaaagtgggggcagaaattgaacaggagagaaatttcatgctctacgttcttggtgtgaccgtgctaattgtgtggcttttgtgggttggatcgcatccttgaaaagatacgttgagttgttgagtcctaaacccccctgcacagtatcttagaatgtgacctggtttggaaatagaatcatggcagcttagttaagatgagttcataagttgaggctttcatgcaatgattgatgttcttctgaaagaagagatgcacacatatagggagatcaccatgcgatgatggaggctgagatggaagttagctgcagctgtgtactaaggaattggcagccagtcaccagaagtggggaagagactaggaaaagatccttcctacaggtttcagagggagtgtggctaccttgaattcagatttctagccccaggagctgtgagagagtacttttctgttgttttaagccacccagtttgtggtacttggttgttgcagccctgggaaactgacaccatggctcaagggaagcagaaatgaaggtcatggagaccagggtggtagaatcatggatgcaatgctgaaaatttggagaacaacatggagagatagagtgaagaaaacagaaggggaatgttctggagtgttctgtagccttcatagctaactgctcttgtcatcctaaggctccttgtacgtcagtctctttgaaagcaaagtgagaggcttttgccattgccatcaaggtgccctctacaaccatgtttgtatttatctcagcggcccaggcttgtcagttcctggcatttgggtttaggttgtacttggtgtgggcgcttggtttcttttagagatattgtaaaagggacactgtatatttaaatagcatggaagacttcaggttgaattgggtcaaggtgcttcccactccctgcacaaaagaattctaattgcagacaactcaatcaaacaatacaactcagtatatttttctgaagagagggaaacaattggaattgaagtgactaattccttttgcaaggtcctctaggaaaaatagaaattctagaatggctttctggagaaaagtctttgaagggtttggggaactgtttagaaaaaagaaagcaaagaaaaatctgggttcaaggaaacagacttgacaatattgaggttgtagggagtgtccagatacccggcatgcttgactgtctctccctctcccatgactccagtttggatatgatgaaaatgaatgtttttaatttgttagcctggagcttctcctgcattggaaagtgattttgggattaatgctaacgttttagaagatttttcccatattgagtgtagaattaaatgtttgcgtaccccatagtgtttactttaatttttccacactcttcaggagttggcaggtatataattctggatgatagcatgtgctgtgtgtactctccagtcctgacgctgcagggttagggcattggtgccttttgttcagtccacgcagggaaacgtgcaggcagggagctggtccgagacgtctccaggcagattacgggaatggctgctcccacaataacaaaaaatggctcctggtggaaaaagaaaaatagaggtagtctgaacttgtggacaggtttgtttcctccttcttagatatgagtatttaatttttctctttttagctccctctctctaccaaaacaaaacagacaactctttgaaaacacctccaaatgatttatgtgccaaagatgtgtgaaaatgatcatcttagatgttgttgggggtgggaaacaaccctcagtggtttgttccattcttatctgtccttgaaaatagttgagaacaaacgaagacttgggactgactgccttggatgtggtctggtttgccctgtaactgacaagagtgatgggtccccgtcgagtgacggcgttggactagaacccaggctgagagagcactgcggtccttggctgatgcactgaagaaaaacgcgtcagatagaaacaaaattactgtgtatccatttctgtgcataactatagtggaagaaaagcaaaatttaaaaaaaacacaccaaaaaccccgtgatcaccattctctgtaattcagactcttttttgtagtaagaagtgccatgcagctttcatgaagttgctggtatctgttagccgcactccattgccatggcccatcttcttgaccttccactcttattgtgggtttccctgttaatcggatcgtgcctcccccctcctctgcaaacaccttatagttttgagagatgataatcaggcataaaatccttcccctgagtctgagtctgggacttcagtcaccttccagcctaagaggctggagcagcctggcatgctccccggcagctgtttttcttagttggtgcattgctttaattggccacagttctcctcatctgtcatgaagactcttaaagctcatacgagagtaattttctccacctcctttattgcgagttttctcttgacggggcacaccactgactctctggaaggcttctctgctcgctttctccagaaagccgttatttgctgagtttctgcaggctggccgattgagttacagcccgaagaatgttgaacctggttctcagctgcaggatgtctttccccaaagttcttgtactgctaggcctaccctgaggattcacatatgtgtattggtttacaacaacattaaagcatcccctgaactccccaccccgcctgccccaggtgggtagattacttttaggactatgaagtagtgctctcacaggggttggagctcagggttggcctgcagtataagccagttcccttctggctggtttcacatacatttatggccttcttttacacctaataggcttgctttgggttttcaggaaaaaattcttcatgcaattagggagagattctgtggtcatttaccataaaaggttgaaagctttaataatgtaaaacataaaacaaccccggaaagtaagcattaattggatctctaagtattgcatttgataagatatacacagagagtgaaagatcataagcagaaaaatgacttgctgatattacaatttgaggttattttagtaatggtgtataggatgaaatagaccaggaaacaacttggaaggaggggcctcacgttagcacattgcccttagacattaagcctgtagcagctgcaacatccaaggtgaggttgtggttgagactgtagtgagcgatttgtatgcagttcctacatcaccactgtccctgtggactgcagttggtcctcttgcttgttagtgttctagacacataagtttcttaaaatgcgtgatttcgtagtagagtcttataattctactagattttgtgtgtagttttatgtgtgtggactaatacttctgtgggtttcagtctacacatttgtattttattcttgtcattagagttctgaaatgatggttggcacgaatgaattctcatctcaactgaagtgccaggatgcccttgctttcctttaaccagtagggagaggtaggagccgtgcggaattacaaatggtggcttctgtgaaagcctgttcaagtgttgttcagagtttcaacaacaacaagaaaatgctatccaagccatcatttccttttttttttttttattatgagtctctagtcattcttgattttgtggcaaattgatggtcaagaaggccaagtttagcctacagtggtgtcttgtttggactgcactgtgaatatcgttaggtggggacaggcactttccagttggccacagtcctcactactcctaatgtcctggcatatcttttttacctgcctggtgcccttgggtcatttatttgcatggtacacaaacacaaagtacattttcatatttcttccttaaagagaatcaaatagtaaaggagatttctatttgatttctatttttatttgtttctccaactgtcttaagactgtgatataaaatgaacaatgagatgcttaaaaggtttgagaggaaacaaaatttctaacgaataagatataataaaaaggcttccgcccaggataacattattaaccagccagttagcccttgagtgtgtgacgttgatcttattgactgcgcttagcagagtgggaagtttgtatgtttcaggtttactgtgtgaacagtcctagtagtgaatgattctggtttaacctttttcagtcttactggaaatatttttgctcctgcgtttcctttattcctcaaatgttgctaaattaactcaggccttggaaagccctgaatagtcatctccatttcacatacttctcttattttttcaattggaagtgttgatctcaagacaagctgaaggctgagcctggttgcattgatctgattgattctgccgtgtgctctgctcggcctccatggaaagaccatatcgagttcgtccactgttgtgaatgaaaataatcagttggtgaaagcacaaaattagaaacctcttggtatatttatttctgtgtctcaagaattctgatttaaagcagactttattccaagtaatgtgaacagtaggtcgttcaggagtctcggatgaatcaatgttttcttccctcctctccaagaaaatctatttaaagcaaaggtcaaatctgtgctggatttagaacctattaaatgtaagtctggaaaacagagccacttctctttttttttgttcttcacatagtttcaagcactggggacactctggtcttctgcaaatcatcatttcccacgtattcctggtgtttgtaactttccttttgttccagaggatggagtgtaacctgtagtgtatatactgagtgaatttgagctcttttgagtcttgggcttattacatttagaaataatttaaaccttgaaagttgtcttggaggagtttattaggctttgaattatacctgagaagaatgtattaatgtatagattaatcaactcatttaaataacctgcttacaaattgactcctcctgcttgtggttcctccccaacccctcctatcctgtcgccctctggcctcctccatctctatgaaggctgataagccatagttggatgtgacagccttagacacagcccctgcccaggcctcacactcagttactgagcccagtcccctttgcttctgtaaaggcttcagtcctgctgctccctccgtccaggccgattagatatatgggtgttggcatagtctctgaactggactccctgtttcccatctttaccttttttatgtcattcttccattcggtaaagatttgaatatactttgcaagccaggctgtgccctcggccctgaatatacaattgtgaaagagtcagccaggaaatcctggcccctgcagctgattctctagtggggagggtggacagtgagcaaaatgtgtcagtaaaagatgtagaagacggacatggtacatgccccaagggaaataaaggaggaaagggaaataaggagtttgcatggggaagtgtaattttaaatgggggcattcaggagggcctccctaagaagccacattgaggtggggtgagctgcatggaaatctgggagaatggatgcaagggagcagcaggtcagcctattagaagaaaagcagaaagctagttggggctctggcaccagaggaggtcagaggggtgctgggcctcgctggccatcagaaggcacttggttcttattcagatggagaccagaagctttggaggactttgaatgtagtgacaggacctgccttccatggtaacagggtttctctgctgggtggaggcccagggacagttcaggaggctgctctgatggtccaggtgagggagggtgaccctagcagtggccaggtgagatatggtcagggtctagatgcatttcagaggcacaggtggcattgtttgctgattgattgaatatatggggtatgacagaaaggaagaagaatgattctgatatccttggtgtgagtacctggaagcatggagctgtcctggactgaaagagacagaagtgatcactgctgtgtttctctgggtggtgttccataactattccatgcagggccatgcaggcttgggagggagggaaccaggaactcagtttggggcatgctatatttgggatgcctgattggactactgtttgggatgagttttgtcctgttggaaatcagagagaatagggctcacaaggagcggatgcgtcacgggcctgaggggcaggaacatgatgcagtgctccaaggagacctctgtctccaaaccagaaacttatagctgccttggtcatctttattctgacttttaatggggaggtgggtccagaggaaaaaaacaagctgtacatgctcagtgacagtgacactcagtatcccagtatcagggaggcagtagacactgggaagcacctggccaagagcacgtgtgtttatttctcaggggtaacaagttcagtgggaacatgggctcagaactccctgacactgtaatgtttcaagagaagctagataacagagttttcttgtggaatctcttggcttttaaattttggcttaaaaatatttcttttaatgtgatgaacagttaacctcttgtcaacctactggttgtatttcctggccactcaaattcgccatcaggaccttttgtgcactgaagtacaaactggtctacttccaccctcaggtaagtctcagtcttcttgactgcggctctgaatgcccaggattctgatggaatcctgcttcctaaaccctgcttggttttcatccacggctcttaacagctcatgacaccgcgttctgtttttatttgtgtagtgtctgtcccctcactaatgtgtaagcccattgagagctgggcctttggagttttgtgcacagctgtgttcctgtagtcgatgtttcatgactgcttactgactgtatgaatggcccaccaagctaacatctcaaatactttccaaaatgtcatcagaaggcccttgtcacggccccaaagaagaagggagtcgtggagcagaggagagcacatggcccacagcggccatgagcagagtgctctggccggggtcaggagttcaggaggcagcagatagtccccaaacaaggggtggcaagcatttcttcagcacctgctgtttgctaggtgattggtttgtttgcttttttcacccagtgggagcagtaaggaaatgacccaggtgatctctttttccattcttcagccaacattgattgaaaggttatatgatccacaaagagcaagtgacagctgccggatgttcatttgaaatttacagacactaatgggggcatagtggtggaagtgactctcatcaggctgtccaggcacagcagtgtccctagagagcagctctcagtgttccagggcctagagaagcttcctgatcccccacatcccagcaggccttcccactgccatcgaggggagcagtaggcagctcttaaacgaaagagccagctctctctccatggcgttgatattcagtgacttctgatctgcggtcacttggtccccacccctccccagttccttacttgttgctttcttagagattggctcctttttctgctggccacatgcctattacttattcccatttcctctctggtcctctcaccattcaccgagcactgtttattctttttagtaaatacacttcctggttttgtctgttatcacaggcagaggtgataccacaggcagaggttaggctcccagcattctaagcctccttaactggctgggtccttgttccagtccatcttccatactgtggtgggtgatctacaaataaaaattcaagtatgctatttctatccatacaaaccttcacaagctccctgtagactctgggatgaagtccaagtgcttcctcccagcctgccagagtccccaccctccagcaccttcctgacacgagactgtggctcaccatactttacaggcctgggatactcactgccccaacagccagacatgcggtgatctttggctgttttcgtgctgttgtgtggctgttttgtgctgttgtgtcgctgtttcattctgaaactcttgggcctctaggatcctgtgcacattataggcctttcctgcctaagagttaattacaggattttgtttcttgctctgtatttcagtgttaacatctgtctccatgaccttccctccttgccagtctgtgtaaaataaagaatggtgaggagagccccaacctgccccaaagcccaccctcacgcaccctagttcgttacgggttctacacagccggaagcctttcggccaggtgtgtgtgtcagggagaagataagacttcttcctcactgtatctgcagtgctgaggccaccgtggaaatgagatgttttctacattttttgcttatttttttcacttactgatttttaaagtttatgtataatagagtgcgccactgccattaccaactggagactctcatgtagaaagtatttccaattttaaatgtggtaacggtgtcctatgtgagcatgagatattttcctgatatagcagaggatttgtagacagctgttcttttctctcatataactctgtctgtactccccagcgcctgctgattcagggagtcctaagaaggtcctgctggcagggctttcaagaaccacgccctgtgggctaacctgcagcctgggagcctgtgggggacagcccagcttcggccctttctgtctggtgcctttgcttcagcaggttccaaatgtgagcctgtgctcccattttcgtcctatggctatgatcttcactgccagtttgcacagcctgcagctgccacacatgcatttagaatatttttaaatgatcttccttcactatttctctttcagaaatttgtcactgttttcatttgctgtttgcacaagactaaatacagcctgggcacattataatttttctaagagtcaaagggactttagagacagtaagtgtggtggctgtgtcttcaaaatattgaagttttaagtttaaatctccaagagtcaggaagttaaataattaagttgagattaccatgttcattttcttatacagcatctgtgaggtttgctttaaaagttttagcacgtgttttaagaaactggttttgtcttaaagcagataagtagttcaaaaattgtaatgactataccgcttatgtgctgcctatgctgacagaacatatattaacatttgtcgctgtaagccaaataaagatcttaatgagattaataaccctttatcttcctttggtaaaatttacctgatatacttaatgacatagttcattaaaaacgctctttgtaaacttaagttgtctagaaaataatttatctggtagtttcatttttcatttgtaaatgtaatctccattgtgctcagtttgggccctttataatttttccaattatcaaggggactttagaaatagtaagcagaatagctatatcattatttgttaaagttgaaaatgttaatccccaaaggtcgggcaattaagctaaggttattatgttcatagtaaaactattcctagttggagtgatgatattaaatgtggcattgattcattgtgtccctcaagtacacagtgacttctagagatccactctgggcaaatggtgtgacaagcaactgttccgtgggattatggaggtcattttatacatagctgagtggtggcttgcaaatgctgatttcacattcttcttgtaggaagatcacactttgaaataattttcttttaggaaaaaaaaacatctattttgaggagaattccatgttttaaaaaattacaaaaagaatccacagtcaagtagtaaatgcttcttaaaacatatacattatttttgagagatttaacagtattcaagaatctgtttgtttagcaaataaaaggattcctggtactaaaataaaaatctagtttgggggaaaaataaattaagcatattagggttgctatttaatatcttttgagaaatgaaaacagtaaatattttcagagtttttttttttttaacctcgatttgagccctgtcacaactgttagttaaattttctttcagtaaatagtagtaattaatagtgttcagactttctgggctctggagcctgagtgcataaatagtctctttcttacaaatgatacttgatcattaacagcatggccagttttctcttatgcatctcacttcctaaatctgtcctctaacactgcatgggatgctttttcaggaaaacgtgggtttttaagaaatttgtgacttttttttttttgaaaggaagaaactaaaattagagtatctcagctaccctgcaagagagcttcttagacaaggcaagcccatgcacacacagtgtgtccctggtattcttgaatgatcccacggtgtatgtcttgaaatctcagcaaacagaaattcagttcattcattaagcattagaaggtcttcaacacaccattggttatttgggaaatgcaaattaaaattactaaatctaatactacgcacccactggaaggctaaaattaaggagactgagcatgcaggtgtttgtgagcatgaagaatagtggcagagctcacctgtgagctcacctgggaacccacagtgactcaggcactttggaaaacagtcttacagtttctggaaggttaaacatgcacttgctctgtttgtgcctgtatgtgtggtatgactgggtaactccaatcttagatttctacctaagagtaatataaacgtaagtctacacagagaccagtcacacagattcatagaagaattattcataatatcctcaaagtggaaacaatccaaatgtccaataataggtgaacacctaaacaaattgtgctgtgttcatacattggaatactgcttggcaacagaaataataaagtattgacatgtgcattaatattagatgaatctgaaagcatcaggctaggtgaataggccaaacagaagagactgcaaactatgattctgtttatataacattctagaagaggccaaactgtagtaaaaagaggtagatgaaaggtcagcagggcctggagtgagggaagggacttgtctgcagcatggaaggagggaactttggggatgatgaaagtgttctgtatcttgattgtggccggggttacctgactctgtacctttggcaaaacttgctgctgaatcctacgcttaaaatgggtcagctttattgtatgtcagttaataaagctgattaacaaaagagtatttctgtagaggcttacatgctagtgtgaatgtgtgaattcaataaattgggttggcttattctgagaaggataaaagttttttgtttttcgttttttggaaatagaaacattttgtgggaggtagggatggccagtgtagagaaatatgtcatggggtaagtgggaaaagataacctgagggtaccagactggcacctgggtgcttgcaggtgagaagccaaacatctcttgaaaatgtttgcttaatgcctgtgagatatcatcctgtcttcctttgaattattagtattataggtagtccttgaaatgttatacatttaacagaaatttctcttatctacttatggactttaaatttagggatattcctagattggaagaaggcaatattcagagcaaaaaggtacaagctttacttgccaccagcagctgccagagtggaggccttatgtaattacttcggcttcagccttggcagcttttgttagcccaaagtggatttgctatatttgtgctttgaattttaccgtttacactcattaagttctataaatacaaaagcatggagagcattagtgctgtcaagaaagaggtgtgattatgttggaaatgaacatgatagtaaaaagaatatgaaagtggcagggaaatggtgactgcagctgcactgggtgtgagaggctgggcagggaacgatctgaagaatgggggagggcgatggtgagaaaagacacagctgatggtcgacaggggacaggagaaagagattcacggaggggaagaaaaagcattgaatgtgtgggataaagaaagagcattatcattagctactcactagcccaattaatgcaggagaagggagtctgctctggaactcgaaggctaagcatggtgtggttgaagtgctgctagtgaaacctgaaccatctgctttgggcatggtcagctctgagcccactggaatttgcaggacatcaaagtgagggctgcagcagctgctgctccatggcatctaggaaatccctcgtggccctgccgagctgacggaggaagagggctcctacccgtgcagatttcagtggtgctggaaccattcatttttgaagagagactcttgccatctgcaaatcggtagaaatgcatccaggttctagaagttttcatctctcctggcttgtttattaactccaaagtgattaacagtggaaccaccttttgaatcctgggtactcctaggttgagcagggctgcacttccaccgtctttcagggttcaccagatgaaactctgaggatcctctatgaatcagcagacacacaacatctcctgagattataaggtggtactgtctgtggtgattacctaattttaatttataaactgggaatgcaaaggccatgctgaccttgctaagaaatgtgaagttcacaggagaacaaaactggggaaaaaggtaggggacagtcgtcagtagcagtcactcactttcgacattaaattatgcgtttgtttaattgtgaaggaaaatacaattgtagaacatgcaccaaaagctagaaatatacagtttaatgttaacacctaaaagcaaaatactaattaaagattttggaatattttttatctttctgggtatgaaacctccagccctgactttttatgccccttataacagctaagtccattgtaactttcagtaattggctttttattaaaataagagactgtagtataaattttagcaactggactaaataggcattaactggccctgggatccaaccataatttgtaacatcgttcctctgggaaaatggattctaagtgcccaataactaccttacaaatagactcttgaatcatagtccatttgagaataaggaactgtttgtgatagtaataccttcaattggctcgcttgagaactgcacagaagggacctatgttccaccacatgtgtgtggtgaacccagctcgtctgggtttgatcaaagattattgccgagtgggcatggaaagtgcaggaattaaactcaaagtagaggctggagacacgtcaagggtggcgttagaaggatggacctggagggctcttagtggtaggaagaggatttcaatcccagaggcaaaggagtgtatctgagcagatgaagggcagggagaagagaatggaagagtaagcaggattgagattgagaaccagccattttcaagcaaaatgtaactcaaagtgtaccagtaaggctgaatagcccaccaagaggtcagagagagacatccctcagatctctctgtctctctctctctctctgttttatttatttttattttatttatttattttgtctgtcacccaggttggagtgcagtggcacgatcttggctcactgcaacctctgcctcccaggttcaagtgattctcccacctcagcctcccaagtagttggaaatacaagggtgtgccaccacacttttctaatttttgggtttttgttgttgttgtctggagatggagtcttgctctgttgcccatttggaatgcagtggcacgatcttgactcactgcaacctctacctcctgggttcaagtaattctcctgcctcagcctcccaagtggctgggattacaggcgtgcaccaccacgcacatctaatttttttgtattttttgtatttttagtagagactgggttttaccacattggccaagctagtccctctcctcctcctgccaaggaagaagaaccatgtattggcatccagtctatcctcatgtgtgctgcagaaataaccctaactggagaaagctgccttcctaagatgagcacctatgtctccatttatgctgtgccctcttacaaaaagccacaggcaatgggctccacatttcagagatttttattcctcactctttccctccttggatccacgcataagtccagtggggaggcccatgggacttggcactgagctagactgggcctctactgtagcacctggatgctctccctgggccaaatctgtgtaccttgtctcatctctttggtgacgtgcttctcaagaggtttttctgtccttcatacactgacccccggcaggcacccctctagaatttcccagacttacctgaatttcctggtgaacacacccaggctgccaagctggcatttccccaggtcagggtaatttttttctctctacccaaattctaaagggcaggctgttgttttagataaggaaggcatagatgttttcaggatgcttgtttgagattcagaattacaaagctaattgacaataaaaagtataaagtttatttattttagagacaggctgttgctggactgcagtggcatgattatagctcactaaagcctccaattcctgggttcaagcgatctttgcacctcacccttctgagtagctgggactacaggcatgcaccatcatgcctggccaattatgtgcctatatgtccctttttttctagggacagagtctcactctgttgtttaggctggtcttgaactcctggcctcaggtgatcctccctctttggcaaaagtgctgggattacaggcatgagccaccatgactggcttctttgtttttaataaaagtccatttaacttttatgcatagaacattattctattaatgtttcgtctattgcaggcatacctcagagatattgcagatttgggaccagtccatagcaataaagcaaatactgtaataaagcaagtcacactatctttttttttttttggttttccagtgcatataaaagttatgtttacacggtactgtactctattaagtgtgcaacagcatcacatctttaaaaaacccaatgtgtgtgccttaatttaaaaatactttttactaaaatacgctaacaatcgcctaagccttcagcaagtcataatctttttgttggtggagggtcttgccatgacattcatggctgctggctgatcaaggtggtggttgctgaaggttggggtggttttggcaatttctcaaaataagacaacaataaagtttgctgcatctgttgactctacttttcacaaaagatttatccatggcatgtgatgccgtttgatagcatttacccacagtagaacttccttcaaaattggaatcaattatcccaaacactgctgctgctttatcaactaagtttatgtcatgtgctaaatcctttgttgtcatttcaagaatgttcacggcgtgttcaccaggtgtagattccacctcaagaaaccactttctttgcccatccataagaagcaactcctcgtttattcaagtttgatcatgagattgcagcacattgtcacatcttcaggcttcacttctaattctagttctcccgttgcttctaccacatcttcagttacttcctccactgaagtctcaaacttttcaaagttatgcatgagggttgaaatcaacttcttccaaactcctcttcatgttgatcttttgacctcctcccatgaatcataggtgttcttagtgacatctaaaatggtgaatccttgctgaaaggttttcaatttactttgcccagacccatcagaggaattgctgtctatggtagtatgaaatctatttcttaaataataagacttaaactctaaatgactccttgatccatgggctgcagaatggatattagataaacatgcatgaaaacaacattcattcatcaacgatgtctctatcagagctttgggtggcccagtgcattgttagtgagcagtaatattttgaaaggagtcttttgttctgagcagtaggtcttaacagtgggcttaatgttcggtaaaccattctataaacagatgtggtgttagccaggctttgtttttccatttctaagaattgatttagcataaattttcagaacggtaaatgagcattggcttcaacttcaagtcaccaacttcattagcctctaacaagagtcagcctatcctttgacactttaaagcttgggattgacttctcctctctagctatgaaaatcctagatggcatcttcttttaatagacggctgtttcatctacattgaaaatctgttattcagtgaagccaccttcatcaattatcttagctagaccttctggcgaacttgctgcagcttcctcgtcagcgcttactgcctcacctggcacttttatgttatggagacagctccttttttaaacctcataaaccaatatctgctaaggctcagacttaacacagctccctcacctctctcagccttcacagaattgaaaagagttagggtcttgctctggattaggctttgatttaagggaatgttgtggttccagaccactttctccataccagcaataaggcagttttgctttcttatcatttgtgtgtttactggagtagctcttttaatttccttcaagaacttttcctatgcattcacgacttggctaactggtgcaagaggcctagcttttggcctatcttcttttgacatggtgcaccatgcttttgacatggtgtaccaaaacaatttcaatagtaacatcaaaggtcactgatgacagattaccataacagatataatcatgagaaagaagtttaaaatattgcaagaattaccaaaatgtgacacagaggcacgaagtgagccggtgctgttggataaatggtgctgatcgacttgcttgactcagggttgctagaaatcttcaatttgtaagaaatgcaattgtctttgaagcacaataaagtgaagcacaataaaatgaggtgtgcctgtattatattaacaaagaaggcattgctaatgatggcatgtattcactgcctgaagtagaagagatgtgtattttccttgatagggaaaattcttttgttgttgttgttgttgttgttgtttttgagacggagcctcactctgtcatccaagctggaatgcagtggtgcaatctcggctcactgcaacctccacctcccaggttcaattgattctcctgcctcagactcctgagtagctgggattacaggtgcgtgccaccacagcccgactaatttttgtatttttagtacagatgggttttcgtcatgttggccaggctagtcttgaattcttgacctcaagtgatccacctgcctcggcctcccagagtgctgggattataggcgtgagccactgcacctggcccagataggggaaattcttgatgaataaatagtaagaggaagaagaatgggttttactgagtgtttgctgtatgccaagtcccgtgctaaataatttacgttgattagtttatttgttcataagaaaagtgctatgaagtttttagctcctttttacacataagaaaatggcaatttaaagaggctaagtgtcttgctgaaggtcacagaggtaacaagtagagagcttggactagaacccaggtcatctgaccacaatgcagggctctagactacatctttcttaaataaatctttatgaaattgtcaaaagtcactttttgagaataaacactgaacaataagacagttttctggaacctgtttctcactttttaatagtagctgatcctcaattttactagaggtagaaggattcttgttaattaaacatatttctttaagattgcaatttaccttatcatataataaattgcatatgaatgttacttaatagtcgtcttccagacagaataatttcagcagaattctgtgcttcccaattaacttaaaccatattttttatgagcccaaaattacattcttatatttgagtgagatatcctgttcatagtcataaattcactgtgaaaacaagaacgtctgttttttttttttttttaaagaaacagggtctcactgtgttgtccagtctggagtggtgtgctcagtgttcactacagcgtcaactttccaggatcaagcgatcctcccacctcagcctccagagtagctgcgactacagacatgcagcagacacacaccaccatgcctggataattttttagttttttcgtagagacggggtttctctatgttactgaggctggtcttgaactcctgggctcaagcagtccctcctgtctcggcctcctaaagtgctgggattacaggcgtgaaccaccgtgcccagcccactttttttttaaatctaaaaaatgttattgtgctttaattccatgtgataatggacattacaccaagatgcttttaaggctggtagtagtgttttggtaggtgttggcagtttaacttgattagatactttctataacatgggaaaaatgatcagcttatttcttacgctggcaatgcatggagagaatggtttaatctgaagatctcagcaggattcaaaattaatattttgtcatatttttatcttttggatgctttaaagattatcttatgcaaactgagaaatgttagtgtttgccattcaagttccaataatgctatctttccccaaaaagcacatttgtttatatggagttttctattctaggggcaccaagaataatgtgtatgtagtgtaaagaagtggattattgtaaatttctaacagatctcactatgaagatgtttgtacccataaaacagacccagagggcattgcattgaaattttaatgtataaatgtgcaaagctgaactgatagtatatttatattagaatgggtgtgttctcatttcaagaaacttaattttgaattctattttgtttttgatattaaacacacaaaaaatgtgattttcccctatactcttgtttcaggccacaagggcagccattactcagcactgcactgaccttgggaatttgctgggcaaggaaaatgacgtggccctgatcatcgatggccacaccctgaagtacgcgctctccttcgaagtccggaggagtttcctggatttggcactctcgtgcaaagcggtcatatgctgcaggtaggaacctgcaggctgtgcacagttcacactctgctgtgtctgtatcccgtgcttatacaaaagaaagggatgcatgggaattctaggtttaaagttttgtatctaaaaaaggcaaaacaaaaatacaaatttatttttaactgttggtgcacagattttgcagaggcagttagtggtttttacatttttgttttgtttattgtcttctgagaagataaaaagagtaagaaccagggcttccagtcacattcaccatgggggataaattggaaaaacactgcctcaagcccctttgagaaattactggggtccaacctactgcacatgtctgagctcaacttccaagatgtgtggggctttgatgcttcttttctggcgtttgttggggtatttcttttcagttaaggaggagctttggtcgggttcatgtgatagcaatttttgtggtaaaatctaaccagaaatctttgtaggttcttcccttcctgggaaggtttttttttttcagttggcagtggtgggggattgttacattccattggctgctggctatgtggaggtctagttctgatagaaatttgaaagtcagacagaattataaagacagtaaaccactagaaagatgagtggtcaccaaaggtcacagagagctggaggggctggctagtggagcatcagtagtggaaaggcatgtcagttttatgcctatggtcacaggatattcagggaccatggggatgaggacaaattcaaatgtgtttgaaacaatgagtgacaagtctgttgtacctttaagtcaggaaacctggtgcagctgtgggggacctggtgcagggagcaatggccagagcaccttgaaatacactgcttctgggttttatgatggcctccttctcttttcctcgaatagcttgattgtgatacaattcacataccatacagttcacctattgaaagcaattcattgcctttgagtatattcacaaaattatgtaaccatcatcacaaccaattttagaatattttcatcaccccgtaaagaaactcctgtatccattatcagttaatcccatcttcctgcacgccttcacccccatcccaaacaaccaatcatctactcacttgtctctctaattagcctgttctttttctgacttctctccatccctgttgtttcatgtgtcagtacttccttctttttatggctgagtaatattccattgtttagatgtaacacatgtttatccatttctcaatgtatgagaatttgggttttttaccctttttgactgttacgtgtaatgctactgtgaagattgatgtacaagcttctgtttggacgtaggttttcgactcctctgggtacgtgcctagaaatggagttgctgggtcatgcagtaactccatgtttaaccttttgaggaactgcgagatggttttccaaagtggctgcaccatttctgttcccactggcaatatgtgattgtttcagttcctccatatccatgctaacacttgtcgctagctatctttttgattagttaggatgtgaagtggtatcgcattgtccttttggtttgaatttttctgttgattaatgatgttgatcgttttttcatgtgtttattggccatctgtatatcttctttggagaaatgtctattcaaatcctttgcccatttttaagttggattatctttttattattgaggtataagggttctttagctactctggatacaagtatctcatcagatagatgatttgcagtttttccccttttaggttaccttttcactttcctgatagtattacttgcagcaaaattattttgacaaaggccagtttatctatctttttcttttgtgcttttggtgtcatagctaatgagctctctttttaaagtagctgatcctgtgctttctttcctgggttctatttgagcagtttagattagggctatgcaaatggaaaacaggatggaaagaatggtggggaaatacttttattcataaatttccctttgtttctacattgtaaagctgctgagtaggtgggtacctgattttatgaatttctccacactggaggttgttactgctctacctcagagccgtgagtcatgggagtcagccacttctgcctgccactgccctgttgatcaaggggtcatccccctgactcgctggtggacaaaaacaagtaacaacgtggaaaagtctggtaaactgtaacccaatgcaaacaccctaaaaccttataagtttttaagagggaaatcaaaatgagtccgttggattctcaggggagatccaggaatgcctgtaagggtttacaggaacatgttcttttcttgccaggtgcttgatactaaaacacacacacacacacacacacacacacacacacacacacacacttttttccccttcttgctgtgactgcttcacagtgctttgtgtgtctcataggccatatacttgaagacttcaaaggggagttcaaactggaattggcacagaaagaggaaatttcaaattaaatactgttacagtctacaaaatggaagcattaattgaaaaagggaatttaggatagtgcatcattttcctgctcttggagacatttcttggctgatctcatacttaagattttaaaaaaatcaacatgtacttaaaaaaaagaaaaaagcacttgtacacttcagatgtacttactattcattgaaaatttaaacttaagctaaatttaatatgtggcttcaaacataaagttgaccttaattttcacttttcatcttcaaaatataatagttgtgagagttacctatttctctaataatgaaagaagtaattttttttcagaaaataactggtctatgaaatcatgaagcatgttcctatcaatattgattcagaaattggtgatgttgtatagaaataaatacctttaaactaaaacagtactttaggcagcaaaaagaagggaatgcaagaatttattaaatattttgctgaaattagaatcaaacaatttgctaattatgcatttctgtacccgaatattttccatatggttaaaatcctagagagggcatatatagtcagcactccagtataatttactttgtatctggcaggggtgttgccatgtaattagttgaagtgtaaactggtccagtccaaggtttttattgtgggcttgcaagtattgtgacatttacattgcaaattcctagtgtcatggatgaataaggagaggagacgtggcctttggtgtagaagtgcaaatagtgaataagagactatgttattgtatttgcctctattcctttgcatctcacatacatcccaattccttgaaacccagcccttagtgaagaaggcatagctgggtctccatctggccacatgcagcagactcccttttgtgcttgattttcagatcctttcagcatctggtgttgagggctcttcccttgaggggttctctttttcttctgtggcacctttctcttctccttaagttatctgtctcctttatgggctttctggctgcctgtgaagtgttgttttcccaaggttttacctctggtcctatcgtattcccactccacatctccccgtgtgccttccatttaatgtgtcggatggcctcattcatcttatacattagtgacttctcacaacaccagcttcatatggaatcatctggagaacttttttgttgttgtttttgtttgtttgttttgagacagagactcgctctgttgccaggctggagtgcagtggcgctatctcagcccactgcaacctctacctcccaggttcaagcaattctcctgcctcggcctcccaaatagctgggactacaggcgcacaccactatgcccaactaatttttgtatttttagtagagacaggatttcaccatgttggccaggatggtctcgatctcttgaccttgtgatctgcccacctcggcctcccaaagtgatgggattacaggcatgagccactgcacctggctgagaactttttaaaaacatattttcctcaaaaagctaaatctggaaagtaccatatgacccagaaattgcactcttaggtaggtatacacccaaaagaattaaaaacaggcactcaaacaaatacttgtatgtgcatgtccataatgttcatagcagcacggcccacagtagcctcaaattggaaaacaacccacatatgaatccatacggtggaatattattgagccataaaaaaaaataaagtagtgacatgtgctacaatgtggatgcagcttgaaaacaggctgaatgaaagaagccagtcacaaaagaccacatattatatgattccattcctatcatatactcagaataggcaaatccacagagccaggaagcaggctagtggttgccagcggttgggaggaggaagaatggccagtgactgctcagtgggcatgggatttccttttgaggatgatgaagtgtttttgaacaggctacaggggataattgtacaacattgtgaccatactaaattccactcaattgaaaatggtcaattttatcttatgtgatttctacctcagtaaaatataaataaatgaataaaagaattcatccatttaaatgaaatgtttgttgaattaaaaaactgatatgtttgaatgaaagttcactcatttgaatgaaatgtttgttgattataaaaaatgaatcctttgagcagaagttttgttagtttaaatgaaatgtttgtggaaagaaaaataaagagtctgattcccaggcccttcctcagagcaataaaatcagaactctagaaattctacaaactccccgtggcacctctcttctccttagttacctgttgattctaaacagcagtcagggttgagaagacaacttctgccatctgcttgtccagcgtggcccctcacttcagctccagtttctgtacatccaaccacatctaggacttttttttttttttttgaggcagtcttgctctgtcacctagtctggagtgcagtgccatgaacacaaacacagctcactgcagccttgacctcctgggttcaagcgatcttcctgttcagtctcccaaatagctgggactagcatgccactatgcctggctaatttttaaaatttttttatagagatggaggcttgctatgttgcccaggctgctctcaaactcctggcctcaagttatcctcctgcttcctcctcccaaagtgctgagattacaggcatgagccacagtgccagggccttttgacagcattagcaagcatggttttatatctaggggacctttagagagattaaaccatataagcacattattaaattgaggtcagacattaaaatctcttaatttgtttatccttttcagtattgcatttagttttataaataaggaaataaaggcctcagaaaaattatatcatgttgtctgtggtctcagctaggagtggaagagatagcattttatgttctatctgaataatatcagggcctatgctcttaagtcacacagttggctgtgtcagctaattcattgtcacacgtttattactgataatacagttttgcacgaaagttttgcttttcacatatttttcaactgtcttatatgtttagacttattcaagaaatcaacataaagtcttgtaggatttgtcattctccaaaggggtgaaagttatgtggaaaatgtgtaaaccattttcaatatgttcaagaaagagttatctgttctttcttccccctttctcattttccctttttctttgaaggtctttatttttgtccaaatggagataaattctctagcacagactaccaggggagaggactttgacctcttgagaacactcagaaatctttaaagtgactgtctcgtcaggaaaagagtcatgaaagaatcatcagtgaccccctgtgaggacgttagtgatggccccatcagagtccccagcaaatacaggtgacatgggggccgctgggcactgcctcattagcagatgtgatttacggcttcacatctctgggcaagagatggagtggaaggaaaacaccgcggcagggatttccacgggatgtgcaaattaagggtttccaaaggcatcatttattttctctgatatgtttagacttctgtctttcaggatagattcaaagataaacatgtataagcctgctgtgatatcatagatttgaaaacaggagagagaaaaaggccgagtggacgcactgaatgtttaaaaagacttcttgggtttatttttctaactgtaagagtgatttatattttttgtaaaaaattagaaaatacagacaaacaagaagaaagaaaatggcattcacaatccccccaactagggattagcactgttgacaattggttgtgaagtcttgatctccttctgtgaaaacacttttcattggacgaagggttacaccttttacaatatgcaaagttaaaggttatacacagtttctatgtcaaatttgttttttaaaagcataatggtgttctgttatatgaaaacacagcaattaatttattcctaattgatggatagtcaggttaacaatgttttttacatgaatagttgcaaagacacttgatgatgtccataaaacaataatggattcaaggataagcaacatagaaacttgcaaaagggcttgtagccttagactcagaaagtaagatgaattggcttagagtcagagagagatgactagtagcttagtccctgctgggacaaacatattctcctctgtttagtaagcatagtatggattccaagccccagtttggggtttgttagcctcactaagaaaggggagcagtttagaggttattttgtgaaagtatgtatatgtatacatgtatatatatactgtccaacattttaacacactggcagtgtatcattcccaacgtcaggtcagtcttccagcctatcctaagcttatcactcacttagcctgcattaaaaaacctggtggacatctgtcttaactttagactacttaatgtagaaaagaactggctcttctgatttggttccttccccagcttagcttttttaccttaatgaggcatgatggataataggaaatcagaacgttatgcattttgtgtgtggtatccttcagcctgtgaactacacacagaattatgtcaaaacagagttcagatgcagtaattagaattgtaccaccaattgtgttttagttggcctccatattggtagggatccaattgtacacttgcacaaataaaacttttctttagtttcattcatgatgtgatttctcagcatcatgaacgattagttataagccagcttcctactttgacatcctattccagagagcattattaacttgtcgaggctgtaagtctatccttgggctgtttgattgtggcttagtatatatttgcccatttgttgattgcatgcaattaaggtagaattcacttttagataggtttttttaaatttaactctaacatgaatgctattgtttgaatgattacagcaattttatttggttctaaatggcttcattgttattttattaaggatgagagcgctcagatgtaatagttcttcagcaccatcttggaaaaaaaatttctcaaagcccaaagcttaaacactgtttttccacccacagatcttaccataatttctctagaataaaactagactgatgcagattttgtagtatattaaaaatagctcacgtgaatcattgtagaggccagaatatgtagagacttgagtattaatctaaagtaggaaaaggaaaccatttctaaataattatttacagcttaggaaaaaaaacaagctttttgaaattaaagctaattttgatgatagcacatttagaaatggagggcaattctcatcttaaatacctattgcagcaaataatttatatgaattactctataagatcaatttctaactgttagggatttctgacgttttgattcccctctaactaaaagttatatatcatcactatctgggtgttactatttcaggtgagaaattttttaaaaagtagcgtatcaactttgtttcttatgtcctggactaataaaacaatttggtggggagcaatatagtacatgtgataaaaatgtggacaaatatttagtataagattgaaaatacaggaagctcttctgcttgtcagctatgagcaactgagtgaatagacgtggataacatgttgagaatacttgccaaggggcatttaataatgaggattgatctataataatatgctgtgtaattgggaacacatctctttggagtttttttggcttataaaattattaccatatcattttgcttatatagtagacctacttttcctaatggttctgaaacctgatttacatggcacaagttcccctccactgagtaccttcacactagtgtttgtttgcagaagctcagatgcaaactgaacagtgggagtaatgaagccctttcctcttttggcagtagtctaagaactatggtaatagggtctgtgtgatctcccatccatccgctctgcagctttcaacacatggggacccttgtgagacaccagaagagctcacagacacatgacttttcaagacttttcctgtgtttctttttttcctttcccctttttcatgaatgattacttcatcagtgcatgtcatttttgacaatactgcttgccaaatgaaacagggtgatacgaggtcacactgtggcctaaaattctgaagtagaagctcataatatttggcatctttcctactagaaaaacaaaccagaaaagaaaatcaagaacagagcttaattaaacatgtggaatatgtcatgaatatttatgtccccaagtcttgccttgtgatggtatttgtacttaaagtgctttttctcctctttcctgtgaaataattcagaatgtgtttcattaatacaagaatgtgtcatgttaactttcatcaggaaaaaatttcacttctgacaacactgacacctttctgattgaaagtatgcaaaatagctcttacgttaattggtcccaaagaaaattatgttatccattttcctgtctatacatctgacactttccctcatctgtcacctcctgaattatcaatgctttcccttgcctgattttgacagccagtattctgcctatgactttaaaaaccataaaaaaaaaactccatcctgggagctttactgtcctccagtttgaataggaagccccaagattacagtcagcaaggtgtagccacatctactactatgccacatctagactgcagtttctctattttaagcctctcccattgtttcttactcgttgaactttagagaggaaacaaatgacaaagaggaatgtttatacttttttaatatttagtcttatttagggtcacaagtaaattttgtcagcaggagctaggtcagactgacagagctaactaaagttgccaaattttgggagcctgtgcttggtttgagttttatgattggtgatgtctgcgccttatgaccattgtcatctgcagagctttgctgggtcagcagagtctgagagggtctgttgaatgatttggtttctgttgtttcttgttaaccagttaactgagctctgtgagagtcccagggctgaattgtcgccagtggtttagtttctgacaggcctgtaagtgagagaggcagacagacagagagacagacagacaccccctccccaaccgtcccatcaaattcttgacacctgggtcatctgagcaaaacagagcatgcatttttttctcttactaagcaagtattcatagtggcgtcctttcaccacttggacacaccaatcattaaagaccaaagtaaatacaccaagttgaagataatcctttcacaaatatacaagtgccaagttaaaactgcctgtcaatcatttgtgcatttttccttactcttgtctgttttaatggatgggtgtggtatgaagatattagagcttgagaaattaggattcctgtgttatcacaattattttgcctctttacagatgattgaaccttaagttcttaatttctctatataaaatcatgatgaatagatactgagttttttttctgaaacagaataacaatagtagggaatatatgtttctatgtagatacatgaacacatgactatacatttaagctcaatgttttcaaacgatgatgcttcacattgagaaatgaattttgaattatcaaatatgggaacaagtttaacaataatatagaagcagattaagtctttttttaagggaaaaaagtaaatgttgaatgatattagtttaatgacacttagatctgaatttataatcccgtgtacctataactgtagtattagcctatgccaatataaacctagttataatacttaaaaataatgaataatgaatgcaattaagggctgataccaacatttcttgaagttttgaaataattataattagagatgttaaagaaataaagtaggatctttctgtggtcatatttgtgtttcctttatttgaaatctgctgccaagagtcttcaggataactcatcgctgggtgtcttgcatttctacatttctacttcagaatgtctcaagctcaagatttctttggtttagtttcacatgtgtttagataatgttgtggagaaggaggagacttttattttttttaatttttaattttaaagtatggatacgtactaattgtacatatttatgggataaatgtgatgttttgatacaggcatacaatatgtaatgatcagatcagggtaattggggtgttatcacctcaagcatttatcttttcttgagtgttaggaacattccaactccgctgttttaattattttgaaatatacaataaattattgttaactataggtgtcctgttgtgctactgagcatcagatcttattccttttatcttactgtatgtttgtacccgttagccaacccctctgtatctcccatcctcaccactgttcccagcctctggtacccagcattctacttaggagaggacttttagacatcttataggtctccgtaagatctattttgtatttgatcctaatatttttttgaaacaggcttttattagtgtggttgaacaggtaaccacactgcttgtcaggccagctcccaggactggccaggctgttcactgtgacccaacttgagggagtacctactgtttaaggttgttgggtgaacacaaatggcacaacctttgcctgcctagagggctcaatctggtgggaaggccagtctggttatgacaaatggtaacacagtcacagcatgaggtgctatgaaagctgaatcttgggagatgacacagcctagtaaactccaagggatgagtgtgtggtgggaaatcctaatgccatcaagaggctagcactcaagctatcgtgatgtccagaccctctgcaaacactaacatctactactcctgagaatcctgaaaatgaagaggaaagttattgctcttattttataggttagcgaactgaggcatagactaacaaagatatatcctgaggtcctctaggtattttttttgttttctgagtcagagtctcactctgtcgcccaggctggaatgctgtggtgcgaactcagctcactgcaacctccgcctcccaggtcaagtaattctcctgcctcagcctccgtagtagctgggattacagggggcgtgccaccacacccagctaatttttgtatttttagtacagacagggtttcactatgttgacgaggctggtcacgaactcctgacctcaagacaccagccctcctcggcctcccagagtgctgggattacaggcgtgagctaccgcgcctggccagtcctgtaggtattaatgaacagtttcaggatttgaactctggagtccatgctgagagactattctaaagataatggtatggaattaaagtattttgagcagagtagcagagctagatcacaggctgggcatggtgactcatttctgtaatcccagcattttgggaggctgaggcgaaaaggttgtgtgaggccaggaattctaaaccagcctgggcaacacagtgagaccacatctctatatttaaaaaaaaaaaattttttttaaagcaaacagagccttaggagaaggcaacactatggaggtcaagttagagttcatatgcaaggtagaggcccgtgtaatacttcaatttagcacatgttagacttccactagggtcacaagtctctggcacatagtaggtgttagaaagaaaagttggactgaatttccagattctctggaatggactatgatccagatttatagtcatttaagagttagaatctgtaattcttagtgactgactgaatgtacttggggatggtgagatggggtagagatgaagcactgctgtaagagagctcatgtcagagggggtcctggaggaggagttcatttccagcattgtgagatgtttagaattaccaccagctgctgggtgttcacttctggtgcaggtaggattctgccaagcccatattctcccagttacaggctatcaatctatctgaagctagaaaaaaaatgcctccttatttatttattttgtatctagcatttacagaatgcccatttctggttagtcaccatagtgtacagggctataggatgaaaaggagagagaaaccatgagtcaaggatacagtctcactcctgtatcaagttactttgcttcaaccagatgtatttattagactgctctttgacttttggcttaatgggtcaggggtgtccacagagttccccattagaaaggaattcttctacctatctctcagtctgcacagtaccatgagggtcttcatcttccaggtgtggaggtggcttatgtcagttagtgctgctgcccactagaaaccctggagcctggaagatgagccttgtaggaaatacctctttctaggtgcacactcaggactacgagaaatgttgaggaaggtgaaggattctcccataactcagtcctcctgggcaggtgactggcggggccagactttgagcatccttgctgaataataagcctgtttggtatgaaatccatgtgctactgatagcagggtaatcctgtggatttgctgaaaccataagggactagatgatacataaaaaggatatcagtgattccacgagtgtgtaacacgagacaaaagacataataaaagccaacctaatactaagcttagatttccatactgctcaggctatgtattaaaaattcttactgtagaatttttagtcaactggagttttctagtaaactgaattggtgtatgttaaaagggtcggaaagtcgggtagggatgatgggtggggagaattgcttgagtaagagatagtagccttaagaatatttccttgcaaaatatacctgggtattcttcatgtttaaaactatgtgattccagcaaagataagttatttcatttgataaaagcaaaagtaagaattatcctcatggaactaaaaccctgttatatttagtttactataccatgtcttccattaaaactatcctgagattaacttgatttatcttgtctcagtttaagtttagcaatttaatccctaaaaatgtagatagtgctcattgtatagaattctcccctttcccaaaatgatgtacgcttctcttttactaaattctcaactttgttagcccactccatatttcagtcttgctgtaagttttagaaagcagaaatcgcatcttctatttctaacttgaaaggcattttttacaactctgtgtaacaaatgtcatcgttcccactacgtctgtttttttctgatagggctaagaggcaagttttattgatttagaatttttcaccagtttatatgcattatgctcttcaaacttgcttttatgtgtgcatgaaaggatattgatttagaacaaatttatattagcccacttttcaaaaccctgcagccaatcagcattatttttggtgctacagctttcatgtagacgttctgcaggaaaaaaccagaaagctctcattgccttgtaccgagattctcagtcaggagtctagaaaagtctttcttgaatctagtagttagtgattcataagtttttgttgtttataacttagtacttttttctgaggcgattctagtcaattcacaagtctcctaaggattatttcaaatgcaggtcacttcgtgttcttgagatgactttgaaatccatctgtgtgtgtgctgaatgaatattgagcatatgtgtcgcaaatatgtttcctgacaaacaacgtgccatgttctgggtcctggggagctagcagctccccagggtagctagcagctaccgtggtggacaagatcagcacagcccagcacaacccctgcctctgtgagactcagggcctgggagaagagctggccagtaaaaattacgtagactgtacagttatgaattagatgcttggtctcttgtatttcagcaattagatgcctttgatcttaggtacgttgaattcttaaatttattagcttctctaatgctgtaggctgatatagatttctgtggctatccttaactatcagctttgattaacccagagtttggtgttcaaaaagaagctgtatccctctgctaaaagaaagaaaggaaggaaggaaggaaggaaggagggagggaaggaagaaaggaagaaaaccttctggtgacctctcagaattaaatttaaaaacctagtgggatgctgcttctcccttgctttctgtgtcccggccacattggactcctttctgttcctttggctctcaaagcaggctttgccccaggactataacaggattttgccccactgacacatggcaaactcacctgattcaggtctttgctcaaatgtcaccctctcagctcaaggcagggtaccttgagtactctggctctgttagtgccactttccatagctttattttgcttgatagcatttaccactacctgacatactattatacttttgcctaattattgataatctgtctccacccaacagaatgtttgtttcattagagcagagattgtgtctccttagccttctcttccatcctcagcactggaaatgacacgagacacgtaatgaacactcaataaatattggtgaatgaatgaatgatgtgataggctaaccaaaccttcactttcttggaggcagcctactcccttctcatgacagttgctgaagttatgctgagaacagtggtgattgtaactatggaaaatgtttagggtgtcagggtcaacttttttctcctttggttatttgtccaatgcagggcacctgcttagctacttttatctccatgttcttggctatctacttgtaggaaatagatacccatgtaagagaatgcaaaagtctcttggaggaaccaaggagccttatgtatccaagttagcatgtactgagtgcagggtgctcttaagatctctgcttggacactagaaatagaaaaaaatatgtatgaagaagtttggataaatgcttcatttgaaagttatataccttagtatttgctttcccattctcatgccacttatgaagggtgaagttggcttcattgacagctaatactgttgaagtctattgtaaaatcagttcattaggttagtgtctattgagcaactactatgtgtatgtgttgtgttgggagtagtgcaagatgaggctggaggagaaaactggggccgaatcacccaggtctgcaagtctcattggaacttggacttgctcctcagtgcaatgtgaaacctttgaaaaattttagcaaaggaatgatgtggtcagatttgtatttttaaaataacagctttattgaaatattagcataccatgtaattcacacatttgaagtatacaattcaatcaaattagtatactcatacagcagtataactatcactactacattccattttagaacatttcatcatccccaaaaagaaaccctgtaccaattagtcattcccaatgtctctccagttccccagcccaaggcaaccacttatttactttctgtctctatagatttacctgttctggacattgctttgcaactggcttttcccacttactgtaaagtcttcaaagggtcattcatgtcgtagcatttcaattctttttattgccaaaaaatatttcattgtatagatatatcacatgtagtttattcatcacttggcggatagttaggttgtttttacttcttggctactatgaattatacttctataaacattcatctacaaatttttgtgtggacatatgttttcatttctcttgggtatatacctaggagtggaattgctggggtatatggtcactctatggttaaccttctaaaacagaactgccagactgtttttctaagtggctacaccactttacatttcatacattacaccccatacatttccactagcaatgtgtgagggtcccagttccaccacatccttgccaaaactttccttttttaagtcatagccatcctagtgggtataaagtggtatttcactgtggttttgatttgcatttccctgatgattaaagatgttgaacaacttttcatgtgtttgttagctacaaataaccagaatatcttccttgggaaatatctgttcaaatcctttgcccgtttttaaattgggttgcttgtcttttatcactgagttgtagcaattctttatatagtcttaatgtcagtatcttatcagatacatgatttgcaaaaaattttttctaattcattgggctgtcttttcacttgatggtattgtttgtagcacagaaattttaaattttgatgaagcccagtttatctacttttttttgttgttgcttatggggtcatatctaagaagccattgtctaatctgagatcatgaagatttactcctatgttttcccttacaagttttatagcttggctcttacctgtagtctttcatctccttttagttagtttttgtatatgttacaagataaaggtccagtttcatgcttttgcacatggatattcagtttttccagcaccatttgttgaagagacagtcttttcctttttgagtggtcttggccagatgtatatttttaaaagatcactgtcagcagggtgtgaagggtttaaaggagtagcgatgagaatagaagtggggagatcaatttgaaaaatatttatgtagctcttattacgtgtaaaacattgttccaggcactggaactatgatcataaacaagtcagacatagccctggcctcatggagcttacattctggcactgaggatgagggatacaaacctaacaggaaagaggaaaaagaagcaaatgcagtgatgacaagttgtgagagaagaaacagtgatgtgcagtgtataagttataggactactgaatatataaagcatgaattgcttatttagttttttcctttaatttcaaagggccaaacataccgactcagaggcaggttggctagagtggagttaggaaaatactctttctggaaagaaaggtgactttaatcattgctgcctatacatgccactatcaccagtgagtcttcacttaatgtgcatatccacctgctggcagcattgccagagtgactgtctgaaagaatggccgcttgttcattcgttcattcattcatcagattatggtagcatggattacagaggtgaagagaaatgaagagatttgagggtggtctagatgtaaaattgggaggatttgtagtcacatatgaaaggtaatagtaaggaagaaggagctattgagaatgggatcagggatttgggattttggtagttatgatagccattgagtgctgagaatgggttaggctctctattgagctctgtccaggcattattccatatgatcctgaaaaaactaaaaaaaaaaaaaaaaaacaccaaggtaggcactaccactaccagcagcagcagacaaaaccaaagcttaggggaggtcaagtcacttaccctagatcacaaaactatgaaactgggtaagtggtggtgccatgtgctactttaatgtacttcttttactttgttgagctcttcttttcaaaaagcatctaaagattgaatgaagaaatatacaacaattctaactaaatgtttaatgaagaaattttgaagggaaaaaatagaccaaaaccactttcttataatctcaccgactgtgtataatgaatggctgtcctttggtggatatgtttccttttcgagagatcaaccctcatctgaatgcctccctcagtatagctgctgctggtcttgtagtatgtgcttggttgtgcagttcctgtggtctggcatgtacctaatgcacacagattggattgaagattgaagttaacctcgcttatcgatggcattttaatttccttcctcttactacattatgtgttttttatgatagtgctttaaagtccaggcttataaggaaaaggaaacaatctcctatgcaagtccccagggtttcagtgaagcagatggcaggaagggtctgggcatggtgtgtgttgcctgtttcaaaattatgtcccatgcaccccagcatttattcccttgatgttggcactgggcaggtgatcagattttaatttgtgtggcgtggtggccttttagagtaggataataacattgggaaaattaggttaagatcaatttgtcatttattttgtcgtaataaaatagagtaaatctttcaaaacagatttacgtaagttccttgaattggaggaagcctcaaatctaaaacttcattaagcaacatcttaatatcacagagactcggggtcagaaaaaatttaaatgacatataaattagtagagtttttcgtttgctattcattttttttcccgttttattgccctggtattctgagtctcttggttcattcttacgtgtgtatcattttggtttgggttatgagtgctcactggcatactggtatacaacactgagagccagtaggctgttattttgctgccattctattgtgtctagagaagtatccagggagagggttgtttgtttttacttgatgaggtgcagaagttgggactgtactgaaaaacagaatgctaaagagccagctccaatctaggaaacatcctccaagagcaccccctgagacagagtgtgaatcacagaaaggaaattagatttttttagccccaaataagaaagattaaaacaccagtaaattgttttacattgattttactaaggttagttagaagtaaaggcttacaaacacgtactgtttatttagtgatagatgaaacttagaggcgtttcttctgttgtaattggttggctctttgcattgattagaactaggtagacaagttggtacaaaaatggcaggagtggaagggaatgggcccctgttgatgtgtaagaacatacgcgtgcatgtggggacaccagtggcattttctgcatgtttcggggtttcagaagacttgccttgttctgcacctctaaattagacctactgtgaaaaacttacaggtcagtttctgggagtgcttttcttcctggactttcccaggtgagcacttagatcctgtgaatccatctccgtgtcggaaacttccgtgatccggctctatgctttaattttgaatgtcttgctatttcatttctttgaaaataaagcagttccacaacattacagccctgtgctgtctactcattctcctttggggattgcttgttttaattgattgattcacagaggagaaagaaaaacaatttgttgctttggcaagattggtttttctaaggatgctactgtcttgctgggtctatgtggcagttagtaagagaagctggcttagcagttctgaggctgacatgaacattgcttcttaaattgaaaggttgggtgggtggatgggtggatgggtggatgggtggatgggtggatggatggatggatggatggatggatgatggagatagataagatagatagatacttgcagcaagcattcccagaacatttgttactcacctcactaaaattaagctgttgttattttgagatgagatggcagataaggtagattcaatcatttaacatccattccaatctcccgtctgtgtcttttcctgtcctgctgatactagaaagctgaaaaatcatcccctggcagcaagggttctgaaaatgactagcctgtcagaatcacttatgtaagacttgaacacagagcagaattaagtgggtagagggatggtgtggtccagacatcagcttgctggcctgactggcaggcgagctgtgcccagagctggcatcgctgtggggcccccatggtggcccctgtagcccatgcttggaggcaatgtaaggatggggctctggtggggcctctggtggctcctgtgtcctgtgcttggagacagtggtatgaggacaggtttcctcatgtagcatcccctctgtgctggtgtctgggtcttgggggtcatcctggaggcacagctcagaggctattcttcaagtctctctcctgattttataagctccgaattcttgtataaagttaccttctagttaaaatacccagcatgatttctgttatctgcacatgacctccgataaatgtatactttttcttttttttttttttttttgagaaggaatctcactctgtcgcccaggctggactgcagtggtgcaatctcggctcactgcaagctccacctcccaggttcatgccattctcctgcctcagcctgtagctgggactacaggtgcccaccaccatgccaggctaattttttatatttttagtagagacggggtttcaccgtgttcaccaggatggtctcaatctcctgaccttgtgatccgcctgcctcggcctcccaaagtgctgggattacaggcatgagccactgcgcctggccacatgacctctgataaatgtatacttctatgggacaaattttcagagttggcaaagaaaataggttcatctttatggaccttgggatctccgtgtgaaactctcaccttccctcaggtcgtccactcatctcacacgtggcctcttcccttacacaggaaggcaactctgggacgtttgctgatgatggctcatcgtgcccacccctcaggtgtgaaacctcagaaccatgtgcatttctcctcatcctcgtcccctttaaccattctccagttcttacttcctgatgcttgcttcttttgagtctaacttttcattcagccttcagcaatccctgtgctacgacagcctctgctaagaacttcatgcaacttgtcttattatagcctcataaaaaccctgtgggaggaaggttagatgccatgtcccaaggctgaacgtagtgctggactgggcagagaggcctcagctctgactggtctgagctgtgggagctttagctttttttttttttttttttcctgacacagagtcttactctgtcatccaggctggagtgcagtgatgcaatctgtacctcgaactcctaggctcaagtgatcctcccacctcagcctcccgaatagctgtggctacaggctcatgccaccacaaatggctcattattattattattattatttggtagggataagggtcttgctgtgtttctcaggttggtctcaaactcctgacttcaagtgagcttttttttttttcaataacagttttgttgagttacagtccatatactaaataactcagccacttagatgtacagttcagtggtttttaatatagtcacagatatgaacagccatcatcacactaaattaaggaacattttcatcacctctaggagaaagcttgtgtttgtctgtttttgctttggttgcctgactctgaggtcttactcaaaaatctttgcccagaccagtgtcctgaagcatttccccaatgttttcttccagcagtttcacagtttcaggtttaacatttacatctttaatccattttgacttgaatgctgagagataggcccgagtatgtacagctgttatgtatcaggtttttaaaacaggtaacctggtacacttgaacagccctagccccctgccctaagcagccacttacctacttcccatttctatagatttgcttgtccttcccatttcttgtaaatggaatcatacatcatgcagtcttgcatgtgtctgtcttcttccacttacgacagtgttttcaaggttcatccacatccatgtatgtgtgcttcattctgttgtatgattgaataatattccattgtatggatataccacattttgtttatccattcatcagttgatggacatttaggctatttccaccttttattgtctatgataaataatgctgctatgaacacgcatgtacaagtttttgcaaggatatgtgttttcattttttcctgggtatatgcccaggagtgaaatcactggctgaatggtaactgtatgtttaacctcttgaggaaccatgaaactgttttccccagtggctgccttattttacactctcaccagcagtgtggaaaggttctaattcctctacatccttgccaatgctggtatgtgactttttgatattatgtgatgtcatgtgacttctcgcttatagccatcctagtgggtatgcagtggtatctcagtgtgggagccgtggctctgaaccccattgcagtaataccctctgctccttagtagcctcctcagttcaatttccccttcttccttgatggcagtagctgatcccttttgtttccagggccttcatcaatagattgctacctaagagggttactaaagtactgtttggtcccaagacttccttgaacaaggccatcaggaagttccccattccctatagggtgctgcctgcattttgctggggttacaggtaccccattattggcctcagccttgcattctgcttttctctcaggcagactttctgaccaatgagactggtatatgttttgcatcctgtacatgctatgtattttgacacttctctttcttgatcccctttctacccatatcatccagaagggactttggtgctgctacagaatttattattagtaacacacacttggcactaattcattgctgtatgttagttgtctattttgacttttgtctgtgtgtaccaaaaatgcatataacttataaaagccacaataaaataagtatttttttctaattccctggctaagacactcagtcttttcaagatccctgtgtacctaagatcatatcctcctttctatcccacaaaggtaactaattttattaattttatcattcacttgtgtttcttcatagtttctataatgaatcaaattgcttatttgctccataatcaagtacatgaaatttgaatggaattgtagtctattattttctgcattatgagttattttgttcaaggttacttgagtttactccgtgttaattcctgtaggtggagtgtattcattctcactgctacataaagttccattgtatgaattttacctcaacttactttattattctcctggtgatagacatttggcttcttgccagatttcaagtgttacatatgatgtggctacaaaaatagtaaatgtcttgggcaaatttgtttttggacataatacttgggagtagaattgcttagtagtggggagtgggcatttttaacttcactaaataatgcaaacttatattcttaagtgaattaccaggagtttataaaaatttccttagatctacattcttgccaagacttgtattttcaatttattttaatctttaccagcctcgtgaatattaaatgctatctcctttctctaactttatacttttcttcttgttaaggagatgacattccttatctttagcaatgtgtttttgccttagaggctcttatttgatattcagttggctacagtgagtttcttgtagttagaatttgcctggcagatcttttacctccttttacttttggcttttctgtattgattttaaacatcatctagccagattttgtttgttttctgtttttaactgcattgaagctggataattcagttcatttgcacagaggctgtagcgattgttagctgttgtttggggtaggtgaaaaatgggagagaggagtttgcttgcagccattgttctgggcagcattccagtccaagatggcgccaggatttctcaccctctggggcactccctccacgtaacccccgagactgcagctggaatgagttttacttccatgacgagctgactttaggaaagggagattatctgagcaggcctgacctatcacatgagccgtttaaatctgggtggagagaacagagataggggaagccagggagatttcaaataggagtaggatttgatggaccgtggctggtttgaagatggaggagaatgcgtggccaggaagtaggtaacctctaggtgctgggagtggcccccaaatggcatccagcatgaaaatggggccctcagtcctacagctctaaggaactgaattctgtcacagccatgtgagtttggaagaggatcttgagctccagatgagaacacagcctggctgataccttgattttacacttgggagaccctgagaagaaaaccagttataatttgtcatgcagcaatagaaaactaatgcattcatgtggcatctgggagggctctgtgcccatgatcaggaacttccagaaggtaattgggcataaatacccagcactccagagaaagattcagcctggggatggattcaccatcactgtcactaacaagcggtagaaatgggatgtgtgggtgaggtcagtcagagagagtgaacaggcagggagaggctgaacagggaagcctggacaacatttcccaatgttgaattgtgaatgatggcctgagggcctgaaaattgatagctcaaggcactgtgagttataaaaactgtaagttttatctccttgatgagttataactcccttatgagctgagagcccattatatactgactgttttcaaaaatacccagtggcctcatctcatattatttctccattttaaaaattcacattgacttctttgggctccacagcacatgcaggctgctgtctagtccttgggtcatttcctgggagtaaggaagagaaataaatcccttccagtaggaatatcttatggtaggcatggaaaagtagaagaaaatgaggtatctgtttttatgatgtcctaggcccattgaccacatcttgggcccacaaagggtgtagacaattgagtgagaacaatcagtataaagtctagattaattttatcctataccagttcaggaaaccattgcctcttccggttcctaggtgtcttcaataaaaaagagttatcagagtaaacaagtgattgaaatactatgtgtcagaccttctgctaggacctgtagagtaaatgtcaccctagataggcagatttcctgtcctcccagagtctgtcatctatcaggaagtgtagcctttaaacaagcgctctgaagaagctgtgataaatgctgggttctccattattgtcatctctgaaggccattggtaacctggaggaatattctcccactaacaggagaaagcacaggatcaaaaagaaaaacttcccttcattcttccagtttctcttaatcattttgccttttacttcctgtcctctgtgagcacgtgtctgtactgttaagtacaaatggacccagaggtttcaggcaaagcctgagtgaggcgctgcatgcctgtcttgcaggtcagggctaggaatggtgacagggctaggaattgaccattgctccattaaagtggaccaaagtggaatctgagtccttttcaggccctaggttcagtctgtgctgactctgaacctctgagatgactattcccaaacctgagggaccgaagatcagcatcaaggacaacagacaggggtgctggggtgcagatgtaagtgagctgggtcttctggagcgctggtcactgcatgctgtgggtataaaatggctgtctagtggaggcagccaggctgctgggaatgactccaggtagaccagacacatgattcttctgtgccttcaacccgatgctttcaagtggcgtgccttagctgtggacattctgaccctgccttgttgaatgctttttgtatttttgctcagagagagaaatcagagtgatttcttttttgtcttatagatcaatcttgtagcttttaaggcagctctccataaggaccacaaaagatcagtctgatagctagatgtcacatgctgtggcagaaacactcctaccagcatacactcattctgtactaggaactatagtaggagttttatttgtgttatttatttcattcacatggcaacaccattttcctggtaagatgactgaagctcagaaaggataggtaactcaaataccattgctaaatatgtttacctttagtatgtagatagacacgcattcagaagaaaacgaaggtgaaatattttggacccgtttgtttcgaatgcatcagtggtgtttattatttaaagaaattctttaaagagaatgattttgtaaagaggataattttctaatttgtgtcaagcaggttgtaatgttttgtacaagtacctgaactagggtacccttgctgagaaggtagtaaagtgtggctatagctacatgtaaatgtaactcaatgtgtcaggtgtccctgtaactaaaggcgcaaaagtgtgaaaagaatggcaagtgaagggcacctggacggtgggcatgttcgtttcctgttgccactgcaacagattaccacaaaggtagtggcttaaaacaacagtaagttattctcttaggttctgtgggctctggggagaatgtgtccttgccttttcagctcctagtagatgctggattctgatggctttttaaaaatgataaattcctcggcttgtggccccttctctcattttcaaaatgtatcccttcattctctgcttctgttgtcacattgctttctccaatcctgcagtgaaatctctctctctctgtggacacttggaattccatttagcgcccacccaatctcagatcatctccccacttcaagatcctttactatacctgcacatttcctttttgccacctaaagtaacatttataggtttcagggattagggtgtggacatctttgggggctgttattcagcctactacagttgccttgaaaggatataggaattatcaattccagggagtccttttcatagcaagagtgctagatttttgagggtctggaggtaaaagaccctgcaatagggcaggaatgctgggaggaaggctccatggggaaaagagaaccaccccaaggagaaggaggtgcagtggacagatacatacatgtgtacatttcagcctcatttttcgttgtcttgattttccgtgtagtacctggtgtctttaatatcatatccccgtccttctccatcaggggtacatgcatgcacgtgatgtagagctggggtaagcaagccgcagagcaaacctggcacatctcagggtgtgttttttctcagatctcagaaaatagcatttatatgtaaattaacctaactatggtgtgatggagaaaccatgaaatgataaataatcaagcttaacctttatgtgacaaactttggtagtcttggaaatatttttgaatatattggaacattacagaaagaagtttagagagttttttggggttgtttggtttcacaaaacattaggtaccacaaaatgctgtggccaaccaggaaagtgattttggcaacgttactatttgtgttctcttttgtcaacgccaagggagccgccccatgccagagctgtatttgcattactgaaaagcaaatatctcaggcctttggacaacacgatacactctcacatgccctggagactctgcgtgtgagatgattggaaatgctcatggctaaagtcagccattatccggaataaactttcccagagggagtttttcagaaacacaccagggaccagtaataaaacataaactataaaatgtcctctagcaaccaaaacacatgggatgtttttctatataatatttcacattaaacgtaattgtagattaacttttatagagaaaatattttttcaagccagatatgcttaaatcctttcatttcctcaagtatgacaaagcactgggaatatactcccctttgtaatttcctaccgatttgccctagttatgaatggaacattaactctgcgaaatctacatatggaaaacgaccccagatgaaaatcttaaactggccatatccctaactctggagtccaagccctgtgctctggtcctggcactgtggctcaccaggtagtcacgtgaccctactcacctgtgcaaatgcccccacgcttctcagatcccaagctcaagggggcgttgaggatcaggtcacccacaagttcccttcctgccctcagcttgcacgtggctcatctgtcaaggaaccacatactgtgtcagattttgttaaagcaaaaaccggtttttatagtctttataaaatgtaaaaacttggaataaatgtaacaatatctaaattcctggtgtgaatgaacagcagctgtagtgacaaagggaacaggtcttgaagtgaaacctgcctggcttggaattctgcctctgccacttaccagctttagtccttgttgaagaaattagctggaatcaggagttttctcatgggtgaagtgaggatacctcatggagaagtctatgcaaaagtaaggttctcagcacaatacccggctaataatattacctgcttagagagtgggggtaacagcaggtgcaatgtcatgtctgctgttttagctacaccaagctccatccacatcttgagttgatgccgtgaataaaggtcatattacttttcagtattactggggatatttgatccatgtgatgggcagataaaatgtctctgtcttagagaaaaaatggactttttaggtagccagcattgcaatgtactattgttagcagacatttgagatggcttctaaaaaccgtgcaagtgaaacaccccaggttttgagaaggggggagcaccgtgtcccaggtcacagggctgtctgtgaacagaattcacctgtatcccctatctcattctgttttacccctgcagacttttgattagacatcttcattgcatcctgagtgacgggaaaatttgtaattagcaaatgcatctgcatatagaagtgtgtgcccgaaactgctgtgcttttagttctcatatgcgtgctccttggaaagtgactgttagtaacattaactctgaaaaccctgtttttcagattgcaaacgtaacttctttccaggtcctattaaatggagattttcctcttgcattcttaaaaactcagagctaaccttggagtggtgtctctttctctccacctctctctccctttctccttctctccttcctcctccactgtttttttcccaccctccccctctctcctttcttgtgcaagatttcagtcagtttactgaattgcctttacatggctatgaccttgaattgcttctgttagttcccctgtgctcttccacattttttcattttaggactacaggctaagcatacttagttattaccttgtaatacacaatcaagataacctggccttggtttctgtgactgtatctcagcctccctgtcctctgtctcgcagagaactagggaaggatggaaagtgactaaaggtatggaatgcctgaggcatggccaggccaggtactgtggcacatattttcgtatgttgtctcatttaaccctgattcataccttttaggacaggtcatgatattcccatttaactgcgctttaaagaagttgaatgtccactgggtcacacttggagggtttaagatctggatttgggtctgagtccaaccacgatgtcatttatatggactgtgtcgcgacacgtgtgtctttttcctggtttggtgttgttattcccctggcaaggtgtgcatgaagtcggtcctgccctacacctgttggcttgttttgtttgacttgtgtttacactcctttttaagatgactttgttaaactgaaaaaaaaaagctgaaatgttgatcaggtagcagatttgcaggagacctaggtactcatcactctagcacttcctaaactgtagttaaagaaacattgttcgggatgctaagtgtaacgtgggggaaaaaaatagctctctgtgcaaataaatttgtataattgttaaatgtgattgctttccctctgagtctttaatctgataatgtgcattctgccagaagggaatgtagtatactgcacctccccagcttgtttttgttcacatctaacttaatttattagaaagcagcctggcgcagttgtgcatgcctgtaatcccaggactttggaggccgaggtgggcagattgcttgaacccaggagtttgagaccagcgtgaacaatatggtgtaaccccatctctacaaaaaatacaaaaaattaaccaggcatggtgccgtgtgcctgtggttccagctactctggaggctcagttgggaggattgcctgaactcaggtggttgaggctgcaagtgagccgtgatcatgccactgcactcccgcctgagtgacagagtgagaccctgtctcaacaacaacaacaacaaaattattagaaagcaaaagtctctttaagacaggtatgtcttcaactctatcaagttggcttttgttttgaagaacaaaagggaatcatggcttggcagtttcagctatgtgtggggactactttctattacactggtcctgcttttacctctggtgtctaaaatgtaataaatatgtgaactagagctcatagggtagcttcaactctgcttagagtttatagcttcaagtggcatgatatctgtcacactcacaagtagtatccattgctgatttctctttgtggttgagcttctttattttattctatattcttactttataatttttcatgtataatagaccaaatgtgattgccataaagaaggccaaatgtagaatccatgcccagtttgcttattctggaaaagcttactatgtaagctgggatttgaggagttcttagatttttattattgtttgattttttttaaggaaggaataggccaggcatgagtggctcacacctgtaatcctagcactttgggaggccaagacaggagaattacttgagaccaggagttggagaccagcctgggaaacaaagtgagacctgtctctacaaaaactcaaaaaattagccaggttggcggcacatacctgtggtcccagccgcacgagagactgagacaggaggatcacttgaacctgggttgttgaagctgtagtgagccatgttcctcccactacactccagccaggtcgcaaaaaagaaggagaggggaggaaaagaaaagaaaggagaaagaaagagagagagagggaaagggaaaagaaaagagagagagagagagaaataaaagaaagaaagagaaagaaggaaggaaagaaagaaaagaccggaaggagagagaaagagagaaagagaaagaagaaagaaggaaagagagagagaggaaggaaggaaggaaggaagcgggaggaagaaaaagaaagaaagagagagagaaagaaagaaaagaccggaaggagagagaaagagagaaagggaaagaagaaagaaggaaagagagagaggaaggaaggaagagggaggaagaaaaaggaagaaagagaaagaaagagagaggtgggaataaagataaggattaaagccataacaattaaaatattgaccaattgaactctcgtgcctgctattttttcaattctcttcccaaacacttttggccaaagaatgctttttatttggggtaaatgttgtccagccttaaattttcatttttctgggtaagggtactaaatcctagagtgctgatatacgatatttaggcctcaccccattggtaagtggaatgtgcctgttgatgtaatcaaattcacagaatgtggaatataacaccctcttggttaaaaaaataagcagagggatttctggcagaatccaactaacactcgcagaaatgaagcacatgaggtgacgaatacaaatgggtcacttagaactaggaaaatccattgtaacagggcacagaacttgttctttttaagcaagagtcttgctaacatccacatttatttcattcatattgaaggtcttcgaaagcttaagctctgaaaatggaagtggttgatttgaagatgataaatggaaactgggaaattagactgcttccataggtgggcagtgtgtcctctttttcaggactccggggtccctgaattgtgagttttccctcacagcctctccacattctctgtgctgttcacctcccacccactgctctgtcttccctgtgttagtgaaaaatcaagcttttccctccctagcccagagagctgagcttttccctgctttactactgtgtttaggaaaaggaggcagctttttcctaaaaagcagtgtttggaagttggaggcacgtatgatgctttctgggctgttatctccaatatccttgctagatgagcagcctcgcatgttgggaaagaatctgtaccagaattcggaatatggggcttgtggccacgtagcaatgaggtcactgaccagctacaatccctggagcaaaccattcacactgcagtcctctgtttcctgctggtgatattcgaggtagtggccatgtgagctccaagctatgatttgttgttgttctgaaattctatgtattatttaaattataatacctcagataaataaatgaaacatctcctgaatttattcttaatatgtaattcatggccaagaatattaactgatgaagtgaatcatttaaagaaggactttgtaatttttctgtgggattgtatttcaccagaagtgcttcagttccgttgagtcctgtgtgatgtacttcagcttgtctgtgagctgagctggtctaacacgctaagtgataacagaatggattctgtgttttatgagtcagtcagccagatctcaaagggataacaattaggaaaaatatatataatttatcccagtaaaagaactagcctattgctgaaaaaaagttgtaccctgtattattgctttttttttgtcccacaggtgtgaataaacctggaaagcataaacatttggaagttattgaaatttattgaaaatatagtacaaaactcccacccttcctttgtttccacccaaaatgtagaattattatagttggctgcagtttttcttatatctcagtggtgtaattttcccacaagtaagaaaactgaatgggtagtatctaagaataagaagctattaaatagcaattttacatgcctttatgatgaaatactacagaagatgggaactgtgtgtcgtgaagtcatggaagtcttcaatgactaataaggaaataatctggctgacagcaggtgttctgattaacagagaagttatttcatagcataataaagaatggcatgaagaattatattgtcaaaaaaacctagccagatttttttgagcaaagaggggtatttccacccctgactgcccactgtaagaataagagacgcttattgtaggattggaaaacagtgaaggaaatagaaaccgctaatggtatcactctcctaaggggactactgttatttcctcttaggcactttgtgttcgcatatacatacacaggcatgcccatacctgtgtgtgcatgcgtgcttcatttttcatggtgtgctctgtgtacattttttgcaaggtccaataggccataaatgacaaaaagatactgggaacctctgtcattagcactctaaagttgtattctttccaccaggaacctttgccttttaattttagtcatttataatttattctgctcttcatgctttgtcggccctctcacatactggattttaatagtttttccaaagcaggtggtatacagaagttgaaaacattgtatcacttaatctattttatacatgggcccatattaaaaagcaaaaaagtcattcatggtctcaagaagtatcttgagaattcatcagttccatctcctttcctcaaatacaactgctcagatcctctgaaactaaggacctcctgaacacaaaattataaaccacaaataggtttaacaccctttgatgtcagcaccttttttcttctgcctaacttcagtaccttatggcacagcttaaccccatttccttttgatttttgttcgttggcgatgaggaacagctggttacctcttttgtaaaaatgaccttttcccaatatacaaacaagatcaaattaccctttaactttctcttcatgttacatttcttcttttcatccttctcttttaccatgaaaagcttgctatgcacaccacatagtgcccagcatatggtctgcattcaataaatgcctattcgactgaataaacttcagtattcattgttaattgctgtgtaaataaagcatcaccctccttcctaattaccttctcccattccacccacattcctgtactggtcagtgctactgggaaaggctctgtgtccagctgggagtaggagctaggccattgctgagacagcacttgcaaaggccatttgcaaggacttgatcacatccttacttttcccatcttcagtttatgtctggaggataggaagtgagtagtgaactgaacacagaacagtaggtaacaggtttatctcttttcaactgatatagtactttatagtttacagtgcctttagtgtcttagcaagcatttattgagtgcctactgtgtgctacccagtgggcaagtgctagagcttcaaggttgcttaaagcaacccttgcctttagggagcaacagcctagtagagggcctggaatgtgacaaaaaatcatgacacattgtgataaggtttcctttctttttgagatggagtttcactcttgttgcctaggctggagtgcagtggtgcaatctcagctcactgcaacccccggcccccagattcaagcgattctcctgcctcagcctcctaagtagctgagattacaggtgcacatcaccacacctggctaatttttatatttttagtagagacggggtttcaccatattggttaggctggtcttgaactcctgacctcgagtgatccacctgcctcggcctcccaaagtgctgggattacaggcgtgagctaccatgcctggccgtgataaggtgtctaatagaggtgagaccaaggcacaatggtggcagaaaggaacaagcgataagttctatctgatggtcaggtgaaactccagaaaaggtggttgacttggtctgtagcacagtacctaaaatgtaatttatttaatatggttccattcccctgtcttgagggtggatactggtcttctgttttggaaatcttattgcaggttgctggctggctaaagcattgaatggcaaggaagaaatgattttagatgtagctgaagagttagaggtcatatcttcgaggacactgaaggagaaataagggttggaagttttttgtttttgttttgagacagggtcttgctttgttacccaggctggagtgcagtggtatgatcatagctcactgcagccttgacctcctgggcttgtgcgattgttccacttcagcctctcaattagctgggaccacaggagagcaccaccacgcctggctaattttttaaactttttgtagagacaaggtctcaccatgttgcccagactggtctcgaactcatgggctcaagtgatcttcctacctcggcctcccaaattgctgggattataggcgtgaacctccacactggcaagggttggaagttcttatgttagaaaaaaaaactgacagcaggaggaggatgaatgagaggaaggtaagtcaggaggataagggaaacaggaggctttttgtatagtcgtgcaccatatgatgacattttggtcaataacagaacatatcaaccatggtggtcccatacgattataatggagctagaaaattcctttcacttggtgacgtcgtagctgttgtaatgtcatagtgcaaatactttatttttcataaatttagggtagcctaagtgtatagtatttataaagtctacagtaggtacagtaatatcctaggtcttcagattcactcactactcactgactcacccagagcaacgtctagtcttgcaagctctgtttatggtaagtgctctatacgcgactactatttttatcttttatatcatatttttaccatacgttttctatgttgaaatgtgtttagatacacaaatacttatcattgtgttacaattgcctaccatattcagtacagtagcatgttgtacacatttgtagcctaggagcaataggctgtaccatatagcctaggtgtgtagtaggttataccatctgggtttgtgtaagtgcattctatgacgtttgcacaatgacagatttctcagattgcatccccttcattatgtgatgcgtgactacattccaagggtgaaaagatggccgctcaagaaaaggctggagaggcagtgggttaagataaggaaaaatttagaaagtaggaggaagattgaacttactttgtcacaaatttatgtggtcacagaaggcactactgcaatgaaccctgtgttcctgggtaggaatcatgtattaactgaacgcgacatgaggttgaaatgattatttgtaaactgttgactgtcagacgtttcagaggggcctgtgaggtatagaggttggcatgattcgttggagacataaatacaagtgtgactttggacacaagtctgaatgaagggtcagtgtaacttttctgtaaaggatcatttcataaatattttaggctttgtggtctctctgcatctgaattctgctattgctgcacagaagttcccatggacagtacatgaatgaatgaatgtggctctgttccaataaaactttatttaaagaaatggacggtgggctggatttgacccggggcaatagttttttgatccctggtctagatgattatcaacaggcaggctctagttgatcatgggagtgtgtgagggggtgtcctgtgtgaatatgtccagacaggcaccccagggaatataaccagcgattgtagagtacaacaaaccagcaaagaaaaatgagataactatcgattggggaaagactaaagtgggagagttttcagtgttagggagggtgcatgtgttgaagtcaactgtcacagacataacctgagtgcagagatgataacccacagtgcttgtgggatttgtgtgttaggaggggagttttagtggagggtggggcagaaggaattttaagagtgaacaagaggcaagaagtgaagacaggagttctaggccgtgtttcctgtgtgttgtcccattcagagatcataactctgcaagggaagaaggcagctatatttacttcacttttaaatatgaggaaacgggtcctcaggaagttaagtgaatagctcaagcctgtgccaaaactcacactcaggtgtttgcaccttatgtttgtgttattttattttattttttactttagccacctggaccccagttaattctcttggtgattctgtaaaatttcaagttaagcaaaccctgtctggtttgaccaagaagagtcacctgttggtttactgatccccagttgagttcacaggtaaaagccacccttatagaagaatccaaaacagactctgtttttgcaaattatcgctttcttttctgtgtgtgtgagacagggtcacactctatcacccaggctggagtgcagtggcacgatcatggctcactggagccttgacctccaggctcaagcagtcctcctacctcagccttcggagtagctgggaccacaggcaaatgccaccacgcctggcttttttatttttattttattattttattttatgtttttgagacggagtctcactctgtcgcccaggctggagtgcagtagcgcgatctcagttcactgcaagctccacctcccaggttcatgccattcttctgcctcagcctcccgagtagctgggacttcaggcgcctggccaccatgcctgactaatttttttgtatttttagcagagacggggtttcaccgtgttagccaggatggtctcgatctcctgacctcgtgatccgcccctctcggcctcccaaagtgctgggattacaggcgtgagccatcacacccagccaaactatcactttcagttacagagatcagacaacattttgtgtaaatatgatgcctctttctgagtctgaagaccacgtcgtacattaggcacactggcttggttaatctctgcatcacttcctggttgcagaagtgctattttcatcttaccagtgagaaactccttttagagtgcaagatgctgtccagaggaagtagggggctgggatttaaactccaatgtccccgaggcttctcacaggtagagtaactgtaacataaactgatggcaaattctggaacgcaggtatgacactccctcttgtctcttgttttgatcacattgtctctgctttttttctttttgtgcccccctcccccccccccacacacacttcttctggtagttgctgtagtttaatctttaagaaggttgcaggggtttggaatttgttacatcctgtcttctcattctgaggtctaccaccatggctgggcatgtgaacccagccagtggtaaatgataaaaatatgctgtgattggaaggaggtggagagcgagcagggaacacaggaagcagagagggatttgtggtgaagggtgggaaggggcctgggcctggagggccccaccaatgtgtctgtgtaccctaaacacttctgttttcagctggcttgcttctgctcacagtttctcaatttacatatgtaagaactgcaggcaaaatgactggaatcaagggcacatgccacttggatccttgccagcttttatttcaggctgacaactctttggatgtaatacaagatttatagttgtttgtttcttctaatgaggtggcaaggtaaatctgcatctgttacagctgtttggcacaggatatattgatttattttctaaaagaaacatgaaaacataaaaatttcaaggtctaaaaatagtgtacattattgtgatggtaactgaacttatcagaagtcaacttatccttgttgacttatccttgttacgtaagtccaacttatcttgttgatgagtgtgggtgggaggcacgactgagagatatattgacagtgaagttgagtaaaagctcttccatttctcttgaacttctggagcaggagagtcacatcatgggatttgagcaggggaagaaaatcttctggtgtttctctcaggtgtctgcacaacccgacctcatccagagcctgaactggagtgtcagccttccatggcacatgctaatgcagggcccagggcaccttggcgatgcctttagggaggttccaggaggagctgctgtctgctcatcaggggctttgagtgtatctcacatatcataagtggagcttgttcacctcatgctcttctttgaatgggaaattctgttctctatcattaaactatgcagaatagaaacagtgtggagcagaaaggtttaaagaaggaaacctatggatttttaacttgcttatgtataactaagtcaactgagagaagagagcagtcttaatataacgtagagggaggttttctctttttatttttttagcagaaattttttagcctgttctattgcaaaataaattcaacttgtcttggagaagagccacacagatggaaaatagtggaaagacagttaaaaaaaaaagcttaacataaatggcaaggtaaccacttgtagctttatgttatgaggattggtatgatgtatcctattttatttaaagaggaataaacttaaacttcatgttgatgaagttggcagatgatcctgaatcaggggagatatcaaaaatctggaaggacagaaatattataatctccttcaggagattaaaagtataggcaggaaataacaaaatgagatacagcttggaaagtgcacactaatgcggctgggaaaaaataatgtaaaatgcagaacctaagtgaacagaagaaatgtgcaccaaaatgccaaaggcaagcaatatttggatgtatacattgcacaacagtccaccacagtgggctgaccattaggggccacctacattgctcatcctcaatagagaaagagggctgggcgcagtggctcacgcctgtaatcccagcactttgggaggccgagacgggcggatcacaaggtcaggagatcgagaccatcctggctaacacggtgaaaccccatctctattccaaatacaaaaaattagctaggcgtggtggtgggcgcctgtagtcccagcttctcaggaggctgaggcaggagaatggtgtgaacctgggaggtggagcttgcagtgagctgagatcgcgccactgcactccagcctgggggacagagcaaggctctatctcaaaaaaaaaaaaaaaaaaaaagagaaagacatgattatttttgcagaaggatgaacagcagtgtttatttttcatttccaaaatttcaccatttaagagataaggagatggtaagtcagtcattggcagaaagcgacataacaacagggagtgtgggactctatgacaataggaatgatgaatgtctgaactgagacaatgtagcagggtaagtggaaatagtggactgaaatgaaatttaggagggaaaatcaacagagtgaagatccaacaaggaggaaggagaagttgaagatgattctatgtagcttcatggctttatggagtgcatggccattgtcactacccacgagaggcattataggtggaaatgcagatttggcatgaaagataatgaattccatattggttgagttgcttaaattggttggagcttaaaggatgttcagctgataggagttcctagcatgtaaatgaatattaaggtctgactgggttagtgtgtcagctaatttgaagtgttgatgagtgataggaaatttcacataattatgttgtagagacctttagcgtgttatctcaaaaggctgaaaaatgtgagaacctcagacaacttggtgagccaatggaagccaatcatttaaacaggcgtctttagataagactctgcttattcaactttcttaaatatggctacggtattatagataaagctatgtgagtaaccagacatttaaaaacacatattgtttttaagaactatataagaaaataagtatttttcagaaagtgtatgagttctcaaatttagttttatcggaaaaatctttgtttgagaaaattaatttaaaaatcatcaccaattctcaaaaatcatggaaattttgatgagcactggatataagtcctgcattctaaggaagctaagttggaagtcagattgttgcctcatttcttaagacatcgggactgatgatctccctggatagtaattagctgttaatgagcacagtacccagactagaagtgtccctaaaatagctgaaacatacactcgagcaacattttagttgtttgtttgtttgtgtttagacagggacttgcttctgctgcccaggctggagtgcaatggcatgattatggctcactgcagccgcaagctccctggactcaagtaaccctcccacctcagcctcctgaatagctgggtatataggtgcacaccaccacacccagctaatttttaatttttttttttttgtagaggcagggtctcactgtgttgtccaggctgatctggacaagcaatcctcccacctcagcctcccaaggtgctgagattacaggcatgagccaccatatctggccaacattttagatcttaattgaaaacttaggaaagttgaattattgatcttcaactaaaatacaaccttcataaaatgagggctcaacatcacagaatttgggggaagggtgctggacccagaaaattgggttctggggcagtatctgccccttttagatgcatgagctttacaaggctcttgagatacctgagcctgagtctataatgcctgagggcaggtgccactcctccctttgacatcttcgttgtagagtttcaggaggtgcaaatgttcattgatgaaaattccagcaaccttccttacaggtacagtcatgcattacttaatgatggggatacattctgagatattcgtcatcaggaaattttatcattgtgtgaacatcatagagtatacacacacaaacctagatgagatagcctactacacacctggactgtacggaatagcctgttgctcctaggctacaaacctatacgacgttactgttctgaatactgtaggtgattgcaacacagtggtaagtatttgtgtactaaacacatcctaaacatagaaaaggcacagtaaaaatacagcattataatcttatagggccactgtcgtatatgcaaaaacatcgttatggggcacatgactgtaaaagtcaaatgctttcatgtgcatatgaggcatatgagataatatacatatataaagtaaattcttaatgtaggcaaagaccatgtgtctcagacaacaaatgaggggtacacatgtgtttcatcataaagaagttttactacaagttaggggctaactagaaactgaggctgtgtgcttctcaaaatgttttctacttcctccccctcattattaaagtgtctcagttattgtcattgtttatatttaattttcagaagggagataaatagtattcagtcattcctaaacatatttgacttaattaatcccccccacacaccccactccacttttctctctctctctctctctctctgtcttttttttttttttttatggtaaatcttttggatcacttgttctgaaggatatgagctgggaactcatgaccagagattctagaaaagatggaggaggcagtgttttgggaaatgacctttggcagtgtaagagaagtttgtcaccccttcgagtctgcagcatatgggatgtgggaggatgtatagaacagacaagtttggtggaggtgctcttatagcacagccctttctgggggagccagcttccaatttggaagggaggggatttattgaagaggtgaaaggtatatgggtgttataagttgtattgtgtccacccaaaattcttatgtcaaagtcctaacctgctagtacctcagcatgtgtgcttgtttaaaactagggtcatttcagatgtattgagatgaggtcattagggtggacctcatcttaatacacctttataaggactggtgtgtccttataaagaggagaaatttggacacaggcacacaggaagaacgtcatgtgaagatgaaggcagaggttgtgcggtgcttctgccaaggaacgccatggaatgctgaagatggcagcaaccaccagaggccgaaagatgtctggagcagattctttttctcagacttcggaaggaatctactctgccaacaccttgatctacacctccggctttcagagctgtgacaataaatttctggtgtggaagccatccagtttatggtgcttggttacagaagccccaggaaactaatacaaggggagatgttagcatggagaattccagcagaattctatcagagtggtggatggtccagtaaagggaaagcgaggaaatcgtgagaattgttccctttgtgggtggtcactaaagtatgggagcagagctgcacttctgcatgtggatttgccggccacatgtttcatttgtaatggtagatgtatcatcaggttctggcatgtgtgggacaggaaacgcctgaaggaattttagacaaatgtgtcctgagatgtccagcagcaccactgaaagagtaccacagtgatttgttctagagctttcaacaagttgatcagtttcatccacttcacctgttgctgggtttttcttaaccttagcaagaacactaattagttatgaaaacctatattgatgaatgaggtgaaggcggtgaggaacatgcatactctctgttagccattgattcattcattagtggactgctctgggaaagagtatttcagattataagaaaagctccaaaatgttgtaggatgtcagttaatcctatgactacatctactacttatgaaagaagtatgtactgtcatttggaacagtataaatgtttaaagtcattaactatcttatattgtgggtctggtttagtaatttttacaaactaacatcttccagtgtgtgccttgatcttgtaggagggaagatattgaaattcagcgtgaattttctttggcaattgcccgattctttttcatttttctgtttataaaccaatttgagtgcagtggattttacttacttaatcctgaaactgtatgcagcatatcttttcttctttggcggctgcttcactgctgttgaaatcagctctcatgcctgcacatggcatctggctcactcaccacccccccgtgtgtatgtgcgcccttctctgtgagccggtggctcagctgcccacaaatgcaagtctgtgggtcagagatggtactgagaagtggaaaactgtgcgtgtgtttgcacatttcatttagactgtacttcccttagtcctttcaaaagaactaaagcggggggaggggagaacttaatttttatacagattgttctgtattttcacaatgagatcatttcagttacatcagtgataaaaataattaggaagtaatagtgggctgataattagattgggagcaacaagatggtgttattgatcctagcccagctgtgtccttattatgagatgttggttagaattctcaatagccactggggtgataggaacctgcctcagacagtgtttgtaataaaaacttgctacaaggcatgttgtgaaattaaaatgcattcatctagagagaaatcctggagtttcttatcgttgctaattagaaacaggttgtattttcagaggaaaggaccttaaatgtattttccgagaatgtttttacggttgcatgacatgacttggggagtacataggggagcactagagcaggggcccagtttttcttttcttttcttttcttttcttttttgagatggagtctcttgctctgtcacccaggctggagtgcagtggcacgatcttggctcactacaacctccgcctcccaggttcaagccgttctcctgcctcagcctcccgagtagctgggactacaggcgcctgccaccacgcccagctaatttttttgtatttttagtagagacggggttttgccatgttggccaggctagtctcaaactcctgacctcaagtgatccacccgcctcggcctcccaaagtgctgggattacaggtgtgagccactgcttggggcctggcttttctgactcggcttaggaatttggaggatgtggctgggatgctcatggcatagaactcagcttgctccttgttttcctgaagctgacatgacaagccccatgcgttatgccgtgagcgtttgatgtcaatgggaagtggcgtgctcagtgacaggagccagcctagactgtaaagtcaacttacaatgaacttatctttatttatgtcctgttttggttccaacgactggacatggacatttgatttggcatcattttcagtattatctcatgaggactcttggaatatttcatttgcttggtctacatctatctaggctctggactatgtatccactctatgatcaaacttggaattttcctgatgcctggggatgggctggagtgtttacaagtggagtaaatatgaattcagccaagatataattgatacaaagagagggtagtatttaaggattgagatgacacttgtatgaatgaaataaaggccaggattggtttctagtgccaatagaactttgattgcttattctttaagtaagattacttttaagcaagcaaacaaaaaccacctgagttttttgaatcatcctctagttcagtttcttaggaatgcagtgccaaaaatggtattttagtaaaagagaaactgtgtcaggatacatcactctgaatgtgacagcatgctaggcaggaggctgactacatcctatcatgttgatggtttatattgttttcaccacactccagatgcctggagctgtgggctgacttctcgttgatctgcagtgagcctctgtaaaaatgttctttaatacccaagagataccctgttgcaaataatacttttcagaaaagtctttaaaattcaggtaaaggcaattcattcatatgagttgtttctccagctgaaattggcattctcaatgatgttctcaatgaactgatgataaagccaactcaagacctcccacccccaaaaaactcccaaacgcccaaaactgtcgtgaaaagaaggaagtcttgttcatggctctcaggatgtctgtaggaatttgcacactgacatgaacttaaagcaggacagatggatggcaagggctgtgcatctcattggatatttaacttgggaaatgagaacagtgagtctagcacgtaggcaaataaagttctgcagaatgaagctgattaaagaatttgaatttgaacctggaaggacttctatggtcctttctatgtatgtaatggtgtttttgtaggtaaatatttgaggttactctgtatagtaggttcaaatgtttgtgaaagtgccttagagttagaaaacaattaacccaggttgagtctattatgtttcctgctcatttgtgggaaagctggtgatcccacactgaaaggaaactggaccagcaccttctcttccctggacggacgttattcatgccccagcagcaataacaatgcctcgtctcaagagctaaaaatctgttgattccagctgaagtgtttagagaaaagtgcattgaagactgaaccatataaacaggtcagagtgaaagccaatttttataaccagagtcaaaatcagtgtggaataattcataggtcattcttaattttatgttaaacattgtgctagattatctccatctttttggcccgtgctttcaaaatatccccatgatcaaagcttcttagataggatatgtttccctccattgtggggaaacacagagcctatggtcgttctgtcctgcgagcctctgcttcctctgcaaagtgagagctccttttccttgtgtttcctgacctcatccaagggtttttaaattattttctaagggagggtgtcactgtctttggaaagatctaaaatagcaaatttttgttttcctgtatacatataagaaaactggaaggagggatcagtagaaacttaggtctaccttagctacaattcatttatttattcagtagcaataatagaggattcgtgcctgttagagccatagcgcttgagcaggcaaacaggcctcatctgccgtgctccttgggctctcatcttcataaggaggacagtattgtgggaaggttagtagcgaagtcagttttcagtgtcgcatttccaaatttttgtggtctttccacataagagtttgaaaatataaagggcttcaattcgaactgtttggcagatgtagcaaaaggtatcctgtgggtccttttattcatgtttgtttcatgtcttccacatacctgataactcttacagaacagtacgtgctggagtggaggaggtaagctcagtcatggaggaggggttagacacgtggaggtgtgcttaagtagaccaaaagctctgcaaggggtttagcatcgcctggggatacaatgcgtggggaggggtttgtttagggaagaatttcaggatgtcaggatgtgtgctttatagataacaatttcatttaacctttaaaatcccccgaagtatggatcagctccattttacagattaggacagagttgcagtgagtagcccaaagacatgccaacacattgactaaaataacattgaatcaccaagaaatgttcttcagggatgtaaaatgcaccaagtttgactttcctaagctgacgtttttagctggctttgttcagatatttttctacaagtatataagttttgttttattacaaagacatttattgggttttaaaaattcattcagccaatcattcagaaaatctataagggttaactactgacatttgtagttcattctgatttaggaatcaccatatggtttaaattccaatttgagaaaaaaattactaagtagagatatatttgtatcatcatatttgtttaagctctgggtttccaaaacagtgtatatagatagtattggacattgtgaatgggctagtttaaattaagaacaatttcactcatagcagaaaaattatttttcgatgaaaggagatgataggattttccccccatgctgtttcatgttgaagatatttcagcaaattggtcagagttctgccaaagtattttgaatgttctttagaagtgtttggaatgacctgatttttctcctcaggacacatctgaattttcttaggcttttggaactctttttttgttttaaatgttacataagctctttggttcgagcattgaatgacatgttatgacatttaaggggaaaaaattttataagcattaatcaatgtaagatatttgttgctttttcattcgaccccatccagctttcatcctgatgcacaccatactggaggcatggctgcttgtttaattgtttagtgcagaacgcggtttgatctctttcttgtgctttcagtgctggtaaattaatcaaaagaagttactgctctgctgggcattagcatgggtttagatgtttctgcttcagggcctgttcatcaactaaaatgcttttaagccccaaatggagagtaaacagcgttgctgcggccactttgaggtgagccattacttgtgacccgcttacatttgggaaggggcctgtttgtattagcagttattctggtttgggttatagcattttcaaaatgttttttctcctttttattttagtgtttttagtatttgtaaagagtgccccccatcaccaccatgtatatacacataggcatttcaataacagtatgtggagattaaaatcagtggacatttctatgaagtttgaaaggtgaaatgtgtatcttcaccatggcttgtagtgagaggacagtgaaattataatgccaattgagatagcagatagcagaatagttttgactaacatgaaattgtggatccttaggttgtttttctgtcttccgtgaaataaaagttgacactttctaactcttggcagcaggtgggccaggcatttgggaggcactgcagacgctgaagagaacagacctttgccttgcaggaatcagtccttccaggaagacaggcctggaaatggtgatttctgggcatgggctgagtattctgatgggaagagagtggaggagggggaagtgaagctggcagaggggaaggagggcctgacggagatgggagaagcatcagaggaccccgccaggaaggagacgacactggaggtggtcttcaggatagagctgaagttagccgaggggagtccagatgcgagggagtttgcggtgcaggttttgtctggagaaaagcagagcagtgggaatgtgggtgaggagggggtgtaggcagcagggaatcatgacgcaggcattgtcacatcgatgtcagagcaggaggctgtgctcggtgggggcagtcagaaagccccttgagtgagcagctacagagcttaggctgttcctggggcaagggagatgggaggaatttaagaaagagtgggacagctttgccttaggagcagaccaaggctgcggtgtagacaggcagcagccaactcatgttccttccgattttctttaaaactggaaaggaagttaaaatgggacattctggtcactatagagtagaatgaatgcctgatgataactgtcacattgtctctttagtttctaattgttgacatctaagtttgtttttaaaataattatttggccaggcatggtggcacgtaccactagtcctggctactaaggaggctgagatgggggattgcttcagcccaggagtttgagtccagcctgggcaacatagcaagaccacatctctaaaaaataaaacaaaacaaaacaaaaaaacgaagaagaagaattatttgcatgtatgtgagctcctgtttgtatacgaaacaaccaagttcatctttagaaatcatctgattgtctcaatatttatttacttatttgtgtccctctaaagccacagtaaggagaacttcggtgaagtcctccctgaagggtcactggtccagttcgtgtggaagacaggccggtgtccagaaagcagctcctgacccaggcagagcaggctgcatttctcagagtagtcgctagagttttcaggagaccaaataaaatagtacacatctgtgtgtagttaccaaagccaggaacacgggccctaactgtgggcagtttccctctgctagtgccccctcttccttggttactctcatctgtctctagttttgggccatacactgtgcccacccccacactgaagcagcctccctccccacagctatccccccgattctgactcccacctgcttccatgttgctctgcccggctcccattccgaaggccggtggtttcagcccagctttgggagcaccgtagatactttcagttcagcagggcccttcgccccaccacgtgatgggattctagaaatgagtgtgttccagtaatagggaggaagtgtggggagcctgggggccctgtcggcaggtacctcatatgtgtagttttggcatcgagtttatacgagcacatgggcatcaaaaagcttgcgaagaaaagtcctcttctgctcgatgtatacaaaacttctgttttgaaagagttgcttggggaaaaaaaaaaggaatctttttggaattacacgtgtagttcactaaagtattcctagtgacaacatagccatgtttaaagcctgagattgtgttgttctctgtccagggtccaacagggaactgaaatcttggaggttttcagcaccacagtgtatcagagcactcacagagagcttgggagtctcaatgacaaaggcgcccgtgggctcacagctagtactgcgtctttggtggacaaaagctccattttcctgataaaatttagcttactgtgcaaatgtgatttatttggtgggtttcctgattctcctacaaggagattctctgtggttatttgaaagtaactaagtcaacctcccataccttggcttactttgaattcaacctcgtcaacagatgccctgagggccccagactgtaataagcagctctgctacagtgcctaccagaagggtaaaggcacagtgcaaagaaatggcaacatcttgttttctaggacttcttcaaataccttgtacttggaaagttatgatggaaatatcctgtaatgtagcatcactgaaatggcttcattttaggcaaggattgtaaagctttaaaattgagtgaaaccttgaagtgtttttattatttatttattttattttatgatttttttttcttttaagagacagggtctcactctatcacccgagcacagtcatggctcactacagcctccaactcctggattcaagcgatcttcctgcctcagcctcctgagtagctgggactacaggcgtgattgccatgactggctaattttaaaattttctgtagagacaaggtctcgctatgttgcccaggctggtcttgaacttttgggctcaagcagtcctcccacctaagcccaggagtttggcctcccaaagtgctgggattaagcctggcctgaattgtatttacactgcttttaataacttatttgctttttctttacaaaagtaatctatgttaataatataagcagaaataataaaatgaaggaataatacacccaaatcagagataaccactttctaaatcattttctcctgaagttttatcactgcatgtatatgtatgtatacatctagtatgtgtctaaaattggatgctactgttacgtgtactgttgtaatttgctttcttcattcaacaataggtagtgagggccaggcacagtggctcaggctcatgcctataatcccagcactttggggggccaaggcaagagagtaccaatgggcatatatattggtgcagtcctacgtaaaggcaatctgaatacaaattttacatgtgcataacttctgaataggcagcttggctatttatcctaagaaatttatcctaagaggccaggcgcagtggctcacgcctgtaatcccaacacttcgggaggctgaggcaggtggatcacttggggtcaggagttcaagaccagcctggccaatgtggtgaaaccccatctctactacaaatacaaaaattagccaggagtggtggcatacccctgtagtcctagctacttgggggactgaggcaggagaatcgcttgaacccgggaaaaggttgcagtgagccgagatcatactcttgcactccagccggggcgacagagtgagactctgaaaaaaaagaaagaaatttatcttaagaaagtaaatggataaatagacaaggtcataggcacagtcactagcttattgttcatcagcaggtccttgagagtgcagtagatgtaaaatgtattgttctggaagaatggacatatgctgactgcatggttttttgttttgttttgtgtttagagacagggtctcactatgttgcccaggctggagtgcagtggcagtgcaagcatagctcaatgcagcctctaactcctggccagtgcttgtttgcccacacataagcattatgtgatattagtctactttgttgttgccaaactctgttcaaagtgtttcctctacctcagattctttttggctggttttagttcagcatctctatccatggtctcagaactagctcagggcaaggctcctctgatttttctttctaactctcctccttccctttccttgccaccctctagcgtgtctttgagctatgtgtgatagcaggttttactggggtgatttataaataggtcatctctcccctcttgcactgtggagtactggggggcaccaccagcgctggctgctgtggggtctttgtgccctccctcggtctccttcagcaagctgggcccttaagctcttgtgccaagagaagggacagacagggcagagtggaggagtgggcatggggcgctgctgatcagagaaagggtagcctggtggccaacagcacgtccaagaacactgtatgagcaaaagtggcagggaaatccgggaagtgggagctcacaaaccaagtgctaacacttacagggtgtggttccacagctgccctttggctcgacccacaatcctttatacagccatttctagcttatttccagcccccagctcagtgctgactcatgtgaatgttggccagacgctctggcttgtgtggttattggcttcctctccctttgttgcatacagtcctctgtttgcctttctacagagtacagcaatgcatagctgcaaatttgagaatctcattctagtgcggtaggtcagtccacaaatactctctgagtgccagctccatgccagctattgagatgaacaccaccaggactatgctgggaaaacagcaaacatggtgctggtattgcagggagatcacagagggaaaattatcctcaacctggagggatggcttcttagctcaatgatgtcctttcccagcttctctcttggagatattttgtctttggaactggcagccacatgacagccatgtgttgctccctgattgtggaagggtctcagtatcctgagtgcttggggtgcacccaaaagacaaacaccacttatgtcaaaacgcaggccccagagttaaggaaaagtctgtttctatcactaacatagcatctggaagaaatagaaaatggctatttcctaattactgttaaagtgtattaagccaacatccatgtatgcttttcctctccttcattcactgaaggactttcaaagaaattgcaccccttgcacttagcatggtgtctgtgtgacttagtcaatgagccgttaggcactgcagataccgtttgttcagtcaagatggatagccctgccttatcactgcgtaacgccttggaggccataggctatctctgcacatctcccttaattgcctggtgtatttatgtgggttgactagtttgttgccatctgcatagctgggttgtttaatatatttttctttgttctgctaatgacctgagcttcattacatgctgataaagaatcctaaaatgtacatagaaaactgacgaagaagaactggccctggccctgaacagaacaggcatgccactatgccggctgcccagactcagcatttgtcgttacaggaaggaatggctttctgtttgcattttaggaaaacttcaccttttaaacatttcaaatggaaaaaaaagtatgcgattttttttttttgaggttttactgatatgagctacaaatagcttcttggaagccagtcagaactctcttttcaataatgttgaaacattttcctttgactggaaattaataccttcaatttagaagaactctagttagaagtttatagcacaaatatagccccatgtaactaagggaatcttggagaattttctgatgtcaaaaaacagagcggtgttagctcattttaaaaaattgttctagtcaaatataaagcaaaaaatcccatttttaatttaatttttataatatttaagaatcatttcagagataaagtacttctgttttttaatatagcaaaagagattattatgatagagaataattatataaattaggattttaggctaagaaaaatggtcttctgttggagtggatggttgtggttttcacttgttagttgtctggtgttattttacataggctttttcaaaatttgttttatgtcaatttctgtcaattttcttagtgaaacactgtttctagacttccacttatactaattgcaccttgattggattatttgctgatttgttttttgggttttttgttgttgttggaggtaagagtaagaggaaaaactacttccagcacatgaatggaaaagaatcactttgctgtttgacgttgcttgaggagacaatgtttgtgacagttgcatgtattcgtatgtttgtaatttattcttgtgaacagctgatactgttttagggcatcaggtcaggatgagctaaatgtacagttctaatcaatcaagacaaatgatggtactatcacaattccatctccagaggcaggccctctccactgtagctcccagcttcacccagggacaaagctacagaaagggaggcatactgaccctgccaaagttccttcttcattcctgattcattccatctccaaacccacctgtgtcctgtggccctcctactgcttatcaaaactgttcccattattgctgcaatctgattcacataggcaaaattggcagtagccattgtgtgcaaagcattccgttgaatgtaggggcaatttaaaaatgaagacataatcttttccctgtaggaacttactatcttatttgtgttattcatattcagtgagtaataatttcagtgtgaatatgtaatataatataataggttgatatataaagaaaccccaggccgagcacggtggctcatgcctgtaatcccagaactttgagaggctgaggtgggcaaatcatgaggtcaggagtttgagaccagcctggccaacatggtgaaaccccctctctactaaaaatacaaaaaaattagctgggcatggtggcgggcatgtataatcccagctacttgggaggctgatgtaggagaatcgattgaacctgggaggtggacgttgcaggcagccaagatcacaccactgcactccaaccccagatgacagtgcaagactccgtctcaaaaaaaaacccatatagaatttgacacatagacagtggacttgaagggaagggagataaattcaaacagggacacgtcagccaagactttcttctcttcttgtttctcttcccacctctgtcctgaagaccttgagaggccttaaagccaggagctgagaggggaagggcactcccagccagcactagctctcagcctggatggtgtcctcacagaggcagggggatggtgctccaggatagcatgcagcagcagctcctactccaggtgtagcagccaggataggttttttcacctttcatccatctttatcatttattcagttttcatggttatcttgtgaagcagatggcaatggcggtgtccccatattataagcagaaaactgtgaattggaggattaggtaactgttggattctttttttttttttttttgagacagggtcttgctctttcgtccaggctggagtgaagtggtgtggttgtggctcctctgctggattcttacagtgttgggagcggaagctgtggtacctgtgttctgtctcccacccacggcccagttgctcagcagaattatgtgaaagcttccaaatgtgtgttttgaagaaatcaaagaatgtaacagagtaggtgagggtgtggagcctggagcaagaagacacttgcttgtgtttagtcttgtcttggccacttcttaggttgtgacctcgggcatactgtgtcaatctttctgagctgggttttcttacctgtaaaatggagagaataacagcaccaattttgcagagttgtgcttaggattacagcagccaatgcgtggaaagcacttagcccagttactgatgatcaaatggtatgtgcgaaatcagcacttgctgctgccctatcattattattactgaatcccatatttttgttttcaacttaaaagcataggctttggcttaaggaacattagaaatcctcctcattggtctcttcacagaggaggaaaaagaggaccagggagggggtctgtctggttaagaagaggcagggagcccctgtacagcccatcccttgaatcctgctcgctcagcgcattcgttccccacccttccccctcattaatatgttcacacattgccaacgcctgagttcttttctccttccccacagcatacactaaacctctagggagacaatacacctactctccaggagatggagtggtgggaggagggaggaattttccaaatagcccacaggatcatgaaggcttttcctcacatgttggtttttatcacctcggaccattggtcacagaatctggtctggaccttgtgccactgtgggaggatggccataggagaaaaagaaaaagcatcgctccctgtggctccagtggacacacgcgtgctttcctcacctttctatcaccagagccccaagacctagcatgcacttgccactgtgccctggaagctgagtcactctcatctaagtggatggcaggtcattttgttacatggtttggggaaaagattacaacaccaaagttgtcactactttaaattctatccatgtgccagttcagtgtaacgatatactatgtgtgtgtgtgtgtgtgtgtgcacacgcacttagaagagagggtgttctctgccaagctgcttgctactccactgccttaacctctctctctatcacactcagtcgcagttgggttgatgactcccatattcggctgagaagtgagtgtaattgtaaggcacaggcatgatatttcaagacctttacagcatgagaagtaaaatccttttctcagtcagctgagagcccctgttatatgtgttcctgacccccaaacccctcatttctcaagtttcatggctggaactttcttcattctcaactccccctttggtaccctcccaatccaagcggttgtgtgtctggctcactctggcctttatctcctttctgagctcagtgactagctctattctgaaggcacagggtcctgctggctccatgctgcagcttccagcccaggtgagtgaggcagttgttggaggtattgaccccacccatgaagccaccacaatgccatacttgatgtttaggttgccgctgttaacctccaaaaggagataacctgataaacatggctgtcctcatgttaatttactctttactgaatagctaccaggtggagtcaaaagttgggatttggcttctctgaacaggggatgtaataaactcatagccttaatctttcaccccttttgatcaaaaactgcaagatgatcattactcatttcatatgataagtgtgtccttgaacatgaaatggaaacaattgaggaggagaaagaaaaaagagctgtgttttaagtccaaaaaaccattgcaaaaacatgggcaattaagcaaatatttgtttattacctattgtgtatgatgctaaaggtctaaagaggagtaaaacaagtccctaacaccaagtagcttgtagcctaattatggagacagaagcacatagccaaccacatttcagatcagactttgtccaaggaagtgctattatgatggtattaatcaattagaaaagcaagttgcaaaataacctttacattagattatgtcaactactattataattagttataaaaatgtgtttcttctatggatacacaatgtcttggggctcatgtcctctctataggcaggcccccatgtacctatattcatccacctgccaccaccaccacatctatctgaaatccgtttgtccatcttttctctgccattcaccaggacattagcagacatatagaatcactggaagtcattttcatgttccatttttggaatggtagaatgccactcctgtttttttaaaacagttttacacatataaccatgaaaaagtaaagcattattatttcccgctattgagatctagaataagtggcttgttaaacagtctttgggttttagaaggtgtgtatgctacttggaagaaagagctttgtgtaaattacctcctttcccacccaagaaattccacttccaaattaagaaagagagagaaagagagagagaaaggaaagaaggaaggggggagagagagaaagggaaagaaagagaaagaggaagagagaagtattaatctgcaaactacctgcctgagtgtgaagcacacatggtgttggccattgctgtccctgtggctctggggtctcttaattgcttggattaggactgaggtgaaggtcagaactggatagcctacccactatttccagagtgcaggaagttacagtttggtgtagatatgggattggtaatcagatgaccttttgttctgtgcacaggtgatgggtgaagggcagacctaattaaaaccatccaatatattaagcatctccgttgtcattaattttcagccgtgcatgagctcacgatgcctggtcctgcaggagtcacaagtttgctctgaaatgtcaaaactcaaacacttctcagctttcctctcagttctgattcctattcccaccttccccacagcagaggtcaggcacactattttgaaatactagtaaaatgtgcagtggggaacaatacatgtatgttaactttgaggaagccagacgctcctgagagggtcttgggggccttaataaagcatttcaaggaagcagagtatcaaattaatgctttttgtgctaaaaacattaaggtatttagatgtgttattctaatccctgtttcagcatgggaacagaaggatctaatatcttttatttaaatcccagccttcctagactgctccattcttttcagtctagtacaggaagagacagactataaccggttgatttcagtgactataaaactgtatataattcacaacatacaacccattcaacttttacatgaaatgcgcttgcccagatcttaatacattccacatcatttagtagagatgtcaggttttcagaagctagactcctgtcagaatgccactttaattgttctgtttttgtggacatgcgataaaattgtcacagacgcaagtaccgatgcataaattctgaacccccaagcaaagtatccttatttcaaagtgagccctttctcagttgtggagtaaaccgatcttgagcagacagggtgtcctcctgtttttctgagagcccctctgcaagtctcagctgcagaggcagcatttatggcttgagtacaggatcgagttttaagggttttgttcagttaataaagaatatcaagttgccctcaccactaacaactgtaggatagctgacctgtaactcctgtttcaaagaagacaatgctcataggatgttgaagcagtcaccagtcatcatgtagtaattaagatcagtaaaatatatgtagagagagatggccatatatatgcctcatgtctaaatcaattgttatggcttcttccctttaaaaatttttggttttcaaggacattattagagcctgaaatcagaatttagacgccatataaaggtatcttcaggtaaacagaatagctagtcttaaaattctttatatttgaggacttaacatccaacgtaagaggtgcagtacactttaagacactagcaagatttttttcaaggtcttttaaaaggacttgtagaagaaccaagactatattttgtgtgtatatgttgggaggtgcatataacactgaaataattaaaattaaacttcctatcattattaaatattgaaaatgagttaaatgaaccctttacacaacaaggaaattattagtaaatgttaatgtatttttgcagtagcatattaacatacataatattttctaaaagctctctctttatttgtggagtgtgaagaagagctcaaattctgtttttgaaagttgagttataaagaatctcttttggaatatggaaacatttaaccttagtatttttgagaaatgatacttataccctgttaaataatttttgtacttatacaatgctgtggaaatttcaagctttccacaatttaatatatgctcaaatatatgtgttaaattcctaaaattaccatggaattgcagcactaagataaaaagcaagatgcttgcacagctgcctgcctctcccctcacctttgcagagactcctggtgttgtgaccttagcacctgttcaactgcagtgtcactgaaaggaaaggacctatgcctggtattgccaaaatatggtggatgttatcaaaacatacatgtttcagccataccaaaataataccgtcagtacatctgggctcttacattacttgttcaacaaatcctggagcgtgttgacctgtatttctcaagagtggctggatagcatcagggtttgtcattaagtcatgcatgttttatcaccaataatgagatatacgtttgtcatattagtcagtcagcaagttaaatccttattctactgggcactgtgttaaatagtcatttgtagtgcaaagatattacagaggcattctattgtggtggaatctgattctaggcttaaatcattgcacaaagagcaaataggtggttgagctaagctgggcaaagtgatgcacacctgcggcctcagctgcttgggaggctgcggcaggaggatcgcttgagaccaggagttcaagaccagcatgggcaacataaagagatcctgtctcaaaaaaagtatatgtatataaaatataatatatattagcacagtatatatatatacacacacatatgataaggtatatatataccttatatattatttattaaatataaataatttgtttggatgatttgtatcatgcagcacccccaagactacttgtaaatgtttggtaagctggtatttattaagccttcaaagtgcttttgtgaggtgttatgcaggggctgggggtgagcttttaatagttgaagcattatgatctaaagaggccaggaaaaaaaactaagcttaggtgttagcttttcccaggagagccctttgtaaggacaaagattgttgtcagccatgtgtcattaaaagctgtcacaaggctgggtgtgatggctcatgcctgtaatctcagcactttgggaggtcgaggcaggcagatcacctgaggtcagaagttcaagaccaggctggccaacatggcaaaactctgtctctatgaaaaatacaaaagaaaaaaattagctgggtgtggaggtgcatgcatgtaatcccagctacttgggaggctgaggcaagagaattgcttgaacctgggaggcggaggttgcagtgagccaagatcattccattgcactccagcctgggtgatggagtgagactctgtctcaaaaaaaaaaaaaaaaaaaaaaaaaaaagctgtcccagaaggcctagaatgtttttaaggatatttgtagaaaatagaatcaagaccactagcatgttggtcaggaagtttgcaaacgatatctgtctcttgaatcacaggacaagtgggctgtttttatctgctttccatgagtgatgcatttagatctcacagaggtggccagtcatttatgtattcctttcatcctctccatctgtgcataggctttcagaattgcacactaatagcctgctcctaggtctgttgtttatatgaaagttaagatagttttgtttaaatagaactgtattttttttctattacgcttaattatgggtggagatgtagctagtcttggaatcatgattttggtagttagtcaccatttattgaatgtctgctgtacaaatcttaaattagacatttggagaagggtgaggaaagggagggatagaaaagaaatgaaagatgtcatctctgtccttgtgaaggttagagagaaaaacatattcccccatgatggatataaccaattatgttgaatagtttatggaaagaaatgtactgattaaataattttttaaaaagtgaattcttaaaacttttatgtcacctgtctgctctttcatgatgcagctgatggcgttagggaaagaatgttaactcaagtcacatgacattttgtaggaaatcccctcttttatattcagatgtggttttgaaatgtctaaggattccgagaaatgcttccatgggaggggctccataacaccttcatctctagaggaaatactggcataggatttccagaattttttgctgcaaaaacaaccaaagctagaaacgctcatccctgaaagtctgtgcctgtggctcatttaacaatggggtgcacgtagtcactctgaaacccattcgctcatggattgttcttttctctgtcagcactcaccttgcttttcaaaatacgtcccaccttagacccaacccgtgtgaggctgcctcttggtcaaacactgcattctttgaaataaaaactgaactgctctcacctttccttcgttgttgcatctctctaaggcacactctcttgcagcttcctcagttacagctcctcgccatgtgtaagtttttatagtgagggagcttttatagtgagggagcacttacatctaccttagaactattgagtgattgagttgaaattttctttctttgtgcctctagataagctaacccacaggtacctattgggctcgcctgaatgcacccccattcctgccactatcctttcccactactgccctcccaaccccaaattctatatctgccactgtgctccaggggccattccaagctgcccaaattatctacttttagaatttagggctacaatgaaatataccaaaatctgggccatgagattaagttttgagggagccgcacagtttggatccgagcacagatgttccagaagggaacgactgtccagaaggcctggacacctgggttgtgtcctgcacaaatgtactaaatgcatctgaagaaagaacacagtagacagaagggatgtggtcagccatggaggcatttaataaataggattggttaattaattttaggttttagactcaaatatcacatgtttgtatatctatctaattaagctatgagatttttaaaggtactgaagtttttgactgactgccatgaaaaagaagatgttatattttatttaaataactatttcaataagaaaatccttttcataggatagtattttcaacaggaaaatgaacacttttccaattgaaatcttctgatatattggagcactttattttatagttaaatattatgtattttaggcttggtattgataagttggtttctgtgtcattacgaaaaacaacttatgaagtcttgtttgttgtatttcggttagtttttgcccctaccaccttcttatttgagacactcagattaaaagaatatttttaatgaaataccaataaaatgtatactttctgggtttctgtttaaaagcaaagaagaaaaacctacatatgcaaaactttaagaaaggggataagattcagtgtttcttgtaattgttaactgtcactatggaaattttgtatgtatcttatgctatggaaattcaagcttagctagaaaacatttttactagaaagaacctgtggtattgtctaggccagtgctggtgacttgagtatggtccagagacaagcagcagcggcagcagccgggagcttgttagaaatgcgcattcacaggcccagcccaggctttctgatcagaggctgtaccttgacaatccctctgggtgattccgatgctcacttaaagttggaaactcattgatctaggacagtggttttcaaacttccttttagtcataaggactgctacatgtaataaagatgttttcaaatccagatagtgaaagaattttgtgagtctggttaattaatatgtgttttgggtctctagggggttcctgggtggagttccttgtaacccctctggctcaagtgagctcagtgtacaaatctacaatcgagatccagcccctctttgacaaccaggcaggtaagatcggaggaggtaaagaatctgcttaggtttgttcagatgatattgcaagatcagaatcagaaactctgagagcagggtttatgtatatcagataaattagtgtatgatcactagttctataaaagcagttagccaaggtttcactaaagtgttatatttgaaataatgttagagagctagtttttaaatttcagggacatgtgtcccataaaatgagatactccaggaactgatttttgtaagtctcaaaagaaaaacttatttttcattttagaatctattatgttatccaaaaaagcagatagaatacttctccagtcaactgaatgcttttggtttatatttctattcataatacaccaaaataggattaaagaagtgcccccaagcacctagcttgggtcagctgtggtctggggtttttattttataggttgaattattatatgttgggaatacttattaagtgtggcatgtgactccaggtcacaagttaagattaagaaacagccggcttgtgcttcctggcaacttggtatactaaaatactgcatatggctaaagtggagtggtgcctcttcatttctgtagaaattagctgttggacatctgttttgaacccctagtgtgtgctagaattatgttttctcaaggcattacagctgagggcataataaatccttgatgagaatttcatgctcctaaaatactaccgtatgacttgctttatataccctggtcaggttttctccttatttttgctttttgggaaaggcagctgttggatgttcatagattgtactttaagccattggaatcctcacttgacttacttgagatccaaatcccagagtggcaagcccagtgagtctatttgacttgctcctcatttcccattggttggcctatcgctaacctccctaacaaaaaaccaacaactttaacctcaaaaaaaacccgggtctgtttaggtccttccctgttccactcctgagattttccgacccctgcagtgtgaagtggccaagcctttgcctgtgggcttcctttctctccagaccaccttgaatttgctgatggagaggccagctttcttgatcagttgggtgacatacggacttaaggaggagtcgcagcctcaggcctgctgagtcctgtttaagttcctgttttacgctctcttgtgatactttcatggatgcataagaggagttgcagattaagtgatgccctccttagtgaggttccacctcagtgaatgaatgattttaattaaagagtgattaatataatcataagaatccagactgtagatccactatgtcctcagtgtctcagcaattcctttgcacagcccttagaccaaaaggaaaacttaagtttctaattattaagtaggtaaagtcaaataatttaagaagtatttatgacccaacaacttagcagacatttgaaacaataatgtcattgaaagacatacattgaaagaaataatccttatttcctccatcattaaataatcattactgttgacaatggcatgtggtgatgtacctgtttacctgttgagcgctgcacgacttctcgaactttagggtaagcatagctgctgccttgctcatttcctattccacattgattttcacaaggcatttgctttttatcatcaccgccacgagagctcagcttcacaacgacatatcatgaaaagggatgcagtgtgatttattgttgaaactgtgagctacttccagctagtattttgcactgttacctgagagacattgctgtatttccctcaaaaattaaaaaaatttctgctgcagcatccccagggcacctgcacacccagttgggaaccacaagtctgatggcatgcattactcagaggtgtccagtcttgttttgtttttccaacagttaagatgtttcacataatcctatgctaggtggagtgtgagatgcaattgttttatacttgctagtcaacacagtggtttcacattaatacatcacaaccatcccatgaggtggctggttctcattttcctgatcccactcatgaaaagcaggggctcatggacttcctttccctgcttaaatggtcaatgtgtggtgcacaggaaaatgtcatactcaggcctttaactgtggctcccaggttgttttctccaactatatttgatctgtggttctgtggagtttcaaaacaaaatgggaaatcacttttgtgtagccagttacagttgtgggctgcctctgccaaaaagatcagcccttggctttaagtagcagttgcacaaactaggcgggaatagatacagcttaatatcccttcatgttaaaattgcttatgtggagttgactagaggcttcattgataagcagtgttaaagctccagtaactttcttttaggccacattaaagtgaatctggcatctgctacaagggagatggtgattctgttctattctgctctcagttgcctaaaagattatacttggaggctatcttttaagttctgaagcatgcctattaaataatggttgaagaacctgagaatatttagcaagcagcaacagagctttgggaggaaagatgtgatagctgtttttatatttcagccttccatatatttgtaagagaagttagacttttcctatttagccccaaatgacagagttagtactcttaagtatgctcagtaacaacaaaaaagtaataataatttgcagtggtcgcacctactgcaggaggcatcgaattgctgccattgcaaacccttgtgaaaatgctaaaagggatatcagattgtgcaacccagctcctaaagtcctttcattatgtttttctaactttctaatttttatctttgtcactgagcaaaggctttttacatggttctacattcagtttgctgtctcgccaaatgcatttctttctcaagttggtagaatgagatgtcaggtagcacttcagttttctgtttggaacaggtatctttgtgggtagagaccatctaggagctgttgaagttcttactgggcaaatctttgagtgtccattctagctgatgcgtgaagtccatatgtgggcgtggccagtagacctctgtgaaatccagaaaaatcttttactttgtgtttattctgtgtgtgtggtggcgtggggggggggtggtgggggggcaagtgctgtttaagtgatccaaaagcttacctgtaaatcccgcaaatcaagcatcagcttaccaattcagaatgtagagtcactcagtcctgagatgctagtctttgcttcgtgttgctgtgttttgtggtctacactctgaataagcacttcattatcatgaatacccctctgctttagaccccacagatttatactggctcctcttcccagacgacttgaggacttaggaaagcttggccgccatcttggattccttgtggaaagaacccttcctatgcaggggctgatcttcttgccccctttagggctgtgcttctgcatggctcaacaaggggagacttccactccctgactcccatcctagatcctctgccttggctgcccttcaaacacagcttcattttctggggcggatgtagggaagtcttttttctttgctcttaccccagccttctttctgcactttatcatgccctgccaatttcctttcccttctgtaaaagcagattttacagaaaattcccttgccagccctaggttgtatatgatgtaccataaagcaaaaggaggtctgtgctggttttctgatttattggaaagacatttccgaagacccctgtaactagactgacttcctttatcattcagcagggcacacgtacccccgaggagtttgtgcagatgcctcccacttagcagagtgattacaaataggctgtgttttaagttagttttctgttgtatatttcatctgagaagttggcaaatacttgaaagccacaagctactgttttctgaaagcttctttgcacatgagcataaaatggatgtattgaatttggagatcgtccagtaactgtccttttaatgcagcggaatgtagattacagctgtttcctctggaaagacatgcatagctctgatttccctctcttttctcacagagtgtctcctctgcagaagtctgagatagtggatgtggtgaagaagcgggtgaaggccatcaccctcgccatcggagacggcgccaacgatgtcgggatgatccagacagcccacgtgggtgtgggaatcagtgggaatgaaggcatgcaggccaccaacaactcggattacgccatcgcacaggtcagcagcttgggcgtccagctgccctgtcctgttgagagatgatagctgggcatgaggacctggcgtttaaccttcagtgcatctccaaacctctgccacccctcttgaggttgctgtctagatgaaaccccggggatatttggaattctctgtagttgtgatcttgtgcagtttggaggccctgtcctgctgattggatttctctggccagctatggggttggccaagctgctctgtgatccaggcaaggtgctgctcctggcagataggtctctgatcttgctaataataacctctcaccttcagcttctgcatctgctgcatggctttttctgctgcattgcctgctgaagcacagctgtgctcatgacagcctttctctataatcctgttccagtctcactcctcccaaaggtgttgggacaccccctggctaggtgcttaaggtcagggagaagcagtgattacagctgtcgccttctctgtagttatgagaggggtgctgtccaggaccacccctgtgaggtgaattgccaagagcacgagctgggtttgggccataatgaccccatggtcagtagcaatcagcctcctgcagttaggccaagttcagtccagcggaggctgatccgagcctcgcatgccagggctcctgatgtgctgtactgcactggtggcctgaggatgaaagaaaggtccactccgtaatgatagcccaaaggtgaaggaagatagccaatttcctaacccgtagggtgcatatctgagaccacctttgcaaaattatgactgagacagtggaagagatctaacttaaccgactccatcttgcttctaacctccaagctgtccttgttcatttctgggcgtaagctgaactaactttgagagaaactcagtttatactttatagtttaaacaaagatggtaacagccctttcccaaagcagacctccttgcctggggactagactaacattagccacaggatttgaaatatggcttaggagtcatgcagctggaggctacgagattctgaccttcttaaactgctcctaagatcagtgcttgagatattttgcagaccctgcacttgatggatcagctggcaccactcagatcaataaactggctcatctaatcttgtggctccccaccacccaggaactgactgagctcaagaagacagctttgactccctatgatttcttccctgactgatcagcattcccggctcactggctacccccacccaccaagttatccttaaaaactctgctccccgaatgcttggggagactgatttgagtaataataaaactccagtctccctcacagccggctctgcatgaattactctttctctactgcagttcttctgtcttgatgaatcggctctgtctaggcagtgggcaaggtgaatcccttgggcggttacatatctagatgatttggcctgctggatcacccagaaaacctagacatcacagcgaatgcagggcctgtccctctgtctccagattgcgatacatcatgaatagatgcctgctcatcggctgggtagcaggaattcccttgtgtttctacggtgttgaggtgtttgaagaatgtgttcaccttaatcacatgaacacaaggaaaaatggctacacaccccttcaacctgaaatcaggtgctgcatataaaatgtgaaggagcttcctatagccccagggcttcaggccagtcctttgcagttctggggctccacctctccaaagcgggggctctgtgttagatcacctctcaggtttcttctcagctcacagttctgcagatgcagggagaaattacaaaatcctcctggctctgaaaagtgcatgcaatcaatcttcttcctttgctgatttcaaataaatcctcaagataatttctgaagtaggtaagagaaggaatcttgactttataggtgggaaaaccggggttccttcgtatcaggtgacttacatcaggtccaagcaagcaagcatcttggggtcagaaaacaacggacctgagtgtgaacttgggggccggccccacgcacacctgcctgtttactttcctgagtcaaatgctttgaggcctgtgggactcgcacttcctgtagtctgtcagcaactatagatgttatacaccccagcattattaaatacttgagttataacatcatatggctggaagggatcttaagaggtttcctaggagttccaggcaaatatttgtctgtctttttctttaaaatgtctagggaagggagatcccatgacctgctttactggaactgcataggaataggatgtgttatccagagcaattgctctcttcaaattaaaagtgtcaaagaagggtggagcagggagcgaggctttaaaacgccattgggggttttcttgcccctccagcatcatagtcacttctgccaaaggaactgatgcagcccacatgtttctgtgcaccctcatttctcctgtccatggtcctattgccgattaggtggggatgctgttacttcagggcaggttcctgctaacctcataacctttgcaccaaccaacatgctgcctctaccttagtcaccatgccagaaaagccacagcttgatgaatttctttgcctctcttgaaatggtaaacatctctggttgtttatcgccttgggctttatctgttcattttaatgtggatgcattttttttattacgcttcggaggaagtaccctcagggttattatactcagaaagaaaaaaatgttagctcaaagacttaccttgggaaagttacgaagtgggcaaagctctggttctatttcttccctgcctaccttgtgcttttatgcacatgggcagcccaagaccgagcgccgtcctttttcagctgccttgtcctgagcaaccttgctgccgtcgctgagtcatggtgctcccctagcccttggctttccattctcctcgggagaatcattcctgccccctgccctcctaatgttttcagaacgacctcatgatgacagcattttgatttagaatatacatttttttttcctgaaaacaaatcactgtagtgctcaagttgaggcattcaggatgactcaagcagatgttttctgtgcccattgaagtttaacatcagggggtcccggtcaaatacaaacttcctttttatttgtttagctagttattttatgatttcccattcccctttggaatccttaatgagcctttatggggagttttatttttccatgtgcacctacttctgccacttcgaagcgatgatttagattccgaatgcgtggtgagccccgcgccttcccctcacctcctggaagaacatgctgagctgggactccacctaggatggagtcctttctttagtgctaatggagattattatgcagtttcctcctgaaaattttttgtttaagtattgtattttcagtctggtcatttcttttctattgagagttacatttaattaattaatttatttatttatttatttatttattattttttttattcagagtttcactcatgttgcccaggctggagtgcagtggctggatctcggctcactgcagcctccgcctccgcctcctgggttcaagtgattgtcctgcctcagcctcctgagtagctgggattacaggcacccaacaccacgtctgactactttttggatttttagcagagacggcgtttcaccacgttggccagactggtcttgaactcctggccttaggtgatctgcccgccttggcctcccaaagtgctgggattacaggtgtgagccactgtgcccagctgagagttacgtttaatttccaaagtcatctgaaattaataagaagtatataactgcaaaagaatttctaatgtcctgggcattctcaatacagcctgcttgtctctcctagtagtgtaataggtttcaagcttgtggacttactgacactctgacttagaacaggaggcattaaggttttcatgcaagggaactaagagggaactcaaatccagtgtaaggcatatcaaatgtgtagaaacgtgatgtaaacagggttgcagctaacggcacatttatgccagagcaggacaccacgcaccagaccagagaaactcgtttccctccctccagcgcaaggtttacactttttgggacctttatgaaacggcacacagaaggcaaagccaggctaaggggtggctgaggagatacgatctgagtggtgtccagagaccccctcccccagtgaggattcctgaatgttactggattatctatggctccaactcaaaccacaggagccatcacatcactcccagcttgggacccaccagcagcccctgactgcatagcactctggccagaggggctctgtactggttggaggcaaaaaaggagaagacaaaatgggtcaagaagtggaggcaaagtgtgtgtgtgtcttagtatatctatgtgtacatgtgtatttgtatgagtatctatgtatgtgtgtctgtgtgtatgtgtgtctctgtgtatctctgtcctgtgtgccactatctctgtgtctaggtgtgtgtgtctgcctgtatgtgtctgtttatctgtgcctgttatgtgtctctgtgtatctatgtgtgtacatccgtgtgtgtctatatgtgtgtgtaactttttaaactacgcagttgttagtggaagtagtgtatgtgcacctgtgtgtacttttcttttaaacaagactgtattgtgtgagtgtccctgtcccttgctctttttgtcactgaaaaaatctgtgtttgcttagagatatctgacttccactgtacttttctttcagtttagtagctcacctttgtttaataattaatccctattgcagcactattcataatagcaaagacatggaatcaacccaaatgtccatccgtgctagactggataaagaaaatgcaatacacatacaccatggaatactatgcagccataaaaaggaatgagatcatatcctttgcagagacttggatggagctggaaaccattatcctcagcaaactaacacaggaacagaaaaccaaacaccacatgtcctcacttataagtgggagctgaacaatgagaacacatggacacagggaggggaacaccacacactggggcctgttggggaggcagggggagggagggcatcagattaaatactaatgcatccagaccttgaaacctaggtgacgggttgataactgcagcaaaccatcatggcaaatgtttacttatgtaataaaccttcacatcctgcacatgtatcctggaacttaaaattcaattacaaaaaagcatttgtttaaatagaatttcataagaataacaattaggagtccagcagtatgtttagggaaaataataataatgtagtttcaagaaggattttacttgttctcactgggcctgaaagctctgtcttcagagaatggttttctgagattcctgcggaatctggtttcctctacctacattatctgacttctgttcataaggacattctgtttgtgacttttattcctcaatgatgggctcttctgagctttgtaattttcctttttcagttttcctacttagagaagcttctgttggttcatggagcctggagctacaaccgggtgaccaagtgcatcttgtactgcttctataagaacgtggtcctgtatattattgaggtaagaaggggtattttttttccttgaagagaaagttcttttaagaggatatcttgaggtatttaaagtcatttcaaggcaggattttgttcatgtaaaattaaaagatgctgctgtgactttctacagcctgggtcacatgtaagctcctgtgaagctgggctcgccattctggtctagatcctcatgctggatgaccaaagcgggcatctgcagcctttcttacctacccggacatgccttcctcctagctctcctcctgtgttcctctttgccatgcctcttcctctgtgtccttggctggggtagaatcttgctaatactcacagcccttccacaggggtcagatcctatcagcagaggcctacaccttgccaggtgatcgctgaggtgttgctggaatgaacaagggggcctgatttctgccttatttctcacagactctgcaagtttcctagcatccattcactgcttctgggatacttggacactggtacttacgtgggaagggtgtgggagtgaggggatagtggggagtaaaacagcaaggtcattgacaatattgcagtgagttcatattctgttgtcagacaattttccaagatgctgattcagttaccagtaaaacaaacgtgcctgctagaggggtgggcccaggaagaaatggaaaagtcacttcatgtttgctattagtgggattacagccctgctataaagggggtggcttttgaggccatcatgactaatcgtttccaactatgtttgtctatggaggaaggcaatgttaattatggtgttttaatgcttcattctactatgggttattttatatctgatttcttgactcttagtaaaaataataagcaaggaagaaatcaactttttctgatgtaagctctgacaatactgggttcaaataactattaataacaagtgccttgctaaggtagctgtaactaactacttctttacccggttgtctaatctttcctactcaatcattcaggtcaaacatataagttcatgtcacacatctggtaactaaactactaaagagtgatttccccaagttgtgcaggttgttcatggcccaagacaaccgggccaaaagagtaaatgaagcagaaacataacctgtgctacttcattcatctcttcagctgcccggagcccaactggaaacagcaatgcatttttctaagttgcacaagggccagcctattcgccaagacgtgtgcacttgcagagaggatgcctcttctagttcacacaaaagccccttgtgggctggggagcagccctgattcttaaggaatgttccaagcaatcaaaagggatctggttaaagtcctgaaactgacccattcttcctaatttgaatcttttgtgggaggtgccctgtctgcttaagtgtatttccctaggaagaaaatacacagcagaggcttgagagatttggtgatataattgacgttttattcagtatagtgaggttaaaatcaataatttaaaaaattattcacaatttgtctgctggtcttgtgctgtaatattcaactcagttcactctgggtgagaacttgtagatattggtgtaagaactttagtggtttctctcttctcttatttttacaattcccttttggcacttaaaggtgtttgtccccctcctgctcctacatttttctgtgtctgtggtaggagtcactcctcaacgtcactcaaggtcatggacgatagtgtaaagaggtatcgtagggtcatggaccatcgtgtaaaagggtattagaatctctgtttcttcgtgctatcccaggcttcccagcattttgtgctcctgtagctgctggctttcacggtttcttaataatctcgttttcttcacaatcagcaaattacagatagtctagacttcttatcaagacattctgcgtggagctcccaatctttcacttttcagatcgtcccctagggccccttcttagtcatttacacctactatcttgctggtgtttttttttttacttcaagtgggctgagtctgagaagagtgcaattttagtctgcctgaaaaattctatttggaaggaggccctgaaagtgccacatgcgtgcctcaaattaatatatttcaattgtagctgagcagcagttgttaaatggtcttttgtaaacagccttttaaacattctttataaagttaaagaaaatgttaaagtctgcaccactccatgcccaattttctatttagtatttctcggggatattaatttgaaaaccaagaaagcaaaatccttgaccgagcctatatggttagagccttgactcaggcagagcctacctaccactgccaaattacttctttcgcatcaacatgcacttcaaatatagttttaaaaataggaaagtactacttacttgcatgcaattttagtgtgttgtgaactgtaagatcaaagattattgtaagttgatttgcttatttgcaaagaatacttttttgttctaaaggtaacccttataattaattacttaagtaagaataaattaaatacattacttatttatcttaaatggttttcttgtaactcaaggagcgattctttacaatagccaatatgttgtcatctcagatgccctctaagatacataactactaatcacttaaaaatgtagtctaaaggcaatttggcaaattaaaaaaaaatacacatgtgtgcatgcacacacacattttatggccttagccattattatgaggatcattataggacttgaattgccaataaagattgtagggaagaactgtaagcctgtgatgtaatgcagtctactcacttggcatactaacctataaaagtggatttttctgtgtaaggaacacatggatgtattcatgttgctatatggaacactaactgaaagttccctccactctcgcccccaaacctccttccgtattatctgtcctgacctttttctctgtaggtatggagatatttatgtatacaaacaaatcaaggattttagataaatgccatcatgctgtgcagagccttctgcaactcatttcacctgacagtgtattctggagaccattcccagttactatgtatagacccagggcatgccatttcacaggggggtttcctgcaatctattcagccattccctgcactgataaacattccacttctctccagtttcaacccccaaaagccttgtggaataacagctttctcactagcccataaatattccacccaaatgatattgatctaattagaccatttttaccacagttccttgaacataacacatgcttacgtatttttatttatacaacaacaagttatttgttgctgacaaatcttaattaatgcttgttgagtgtgccgcataaaattcaagccaaaataactattggtttgagggatttaaaaactaggaacaaaattatgcaatacatggtttcatgttagccctattaataggtaaaactgaaaatactacaacctgtgcctccatcctccctgcagctgccttaatttagtactgttttctgggttgattacaaaaaccgctagtttcacttccttgaccatctccgctgtagctaggatacgatttctgaaacatacgtctgatcaattccagtgtctggcacaatgtctggaatggaggtgcttgaaaatgctggcaatgaaagagtgatgaatgctgctgcttcctgcagccccttcccaggctccctgtgccttctgatgaaatgcccatctccgtcccgtcacctgcccctctgcgatctgggttccaactgtcaccagcctcctctgccactgtatcctccttactttatttgtaatcagtgttactcaagtatgattgatgtacagcaagataaacactttttaagtgttccattctatgaattaaaactgggtttttatcattagaaacacactgaggattttgtctgtctcccatagacggtgaccagaatgtctcagagagctctggagacaaacagatggtggtgatggttgcacaaggctgggcactggaactgcagtgcaagtgtgaacatgggaccacacacttaaaaatggctatggtggcagactttgttatctatattgtacaatcattttaagatgctaaaaaaaaaaaaagagaaaaatgtcacaaacacttggctgctttcatcgccttgagagagacaaaaatgtataaggacagattgtatgctttggcgagcttattgaaggtttgaaaaacaaattttacccatagttttgttttgcattaaactaattaaatgctatgtttcatggtcgtggccagatggaccatatttctcagaaggtaaaatcctgttgttgtctagaatgctcagagcttcagagccttgcagggcagccagctgggagtggggttggggtgggtggggcaggggggcggtgtgtattccctgtgtgtctgcactgggggtgggaatgggatgaaattagcaaaagcaaggagatagagcagggtaaagatatgtgagtgaccagggaagggcatctgaatggctcagtcggagtagtattgccattggaagctgggattcctttttttttcttctctttttgcaatagtcaaattacatagtaaatgtgatttaggaaaatttgtctatcaatatgtagggcagatggcaagcagagaacttacatgtaattttgtagttttaagcctggggcatagatcatgccattatgtaactatctctccatgtaatttagaagcagaaagcaaagactgatttttaaaactctttgatgttgacaatgggaggaatttgccttaaatgtaaagattaggggtaaagaggttaggaaaggattcctataaatttttgaagtcttgactgacctctgtgtggtatctcctaaggagagggattgaataagttctttaaagctcctacactatttaacaaactatgagttagttgttcagggttttcttaatagagtacagtttcaaagcacagcagcatcagcattttaagcatgtattaggtggcatatgcatttgtttgtggactttctgaacctctgggaaaaggttatttggaatagataacatttttagtggccataaaattcaaatagaaaaataatagggacattacttgaacttaacctatatttcgaaaaattatcatagggatctcttgtaaactttggtataacataaggaagatatgccaaattatttttgaaatagagatgagtctgaaatcataatggtgattagttggtggttcctaatacaaagaataaccataacatatgtatattgatgtgaaaaagtggatattatatacagcttggagtctacttatttttggcaacacatacaagaaattttagtgttttcttgggggtgattaaactgataggggataaaggccaggaaatgagatgcatatttagcaggaaggtctggaaatactatcactgaaatagaaatagatattctaagaccacagcaatttggggaccaaatgaaactgaaccgcagaatttagttgacagctgtttaaaaatttgtcaatatctgacaagcctaaaacaagcaaacaaacctttattatactgcagcagagattcccaacctttctggcaccagacactggtttcagggaagacagtttttccacagagggcatggctttgggatgattcaagcacagtacatttatcattagatcctcataaggagcgtgcaaactagatcccttgcatgcgtgttttacaatagggttcatactcctgtgagaatctaatgctgccactgatctgacaggaggcggagcttaggcaatattgcccgctagccctccgctcacctcctgctatgtggtcgggtttgcaacagccaccgaccagcaccagtccagtccgtggcccaggggttggggatccctgtactacaggatatgagaaaaggccttactggcagtttgttttctgtgtcttcgaattctcacgcctgtaatcccagcactttgggaggccgaggtgggtggatcacgaggtcaggagatcgagaccatcctggctaacatggtgaaaccccgtctctactaaaaaaacacaaaaaattagctgggcatggtggcaggtgcctgtagtcccagctactcgggaggctgaggcaggagaatgacgtgaacctgggaggcggaacttgcagtgagcggaagccgagatcgtgccactgcactccagcctgggtgacagagtgagactgcgtctcaaaaaaaaaagtgaaatgaattatggttcatgtataaattgccattttaatccaaaacgttttcagtagatgaatactttgattttttaaaattgttttgcaaacatatatttccttttgctgttttacagctttatttttttctgttggacctgtgagagattttgttttatcatcaattttttattattgtttgaaaataatcattatttttcaaacttttttttgtttgttttttgagatggagtctcactctgtcacccaggctggaatgcagtagtgcagtgttggctcactgcaacctccgccttccaggttcaagcgattctcctacctcagcctcccaagtaactggaattacaggagtgcaccaccacactcagctaatattttttgtatttttagtagagacaagttttcaccgtgttggacaggctggtctcaaactcctgacctcaagtgatccacccgcctcggcctcctgagctgttgagattactacaggcgtgacccctttgcccgaccttcaaacattgttagaaaaaaatcatatctaaattaccccttctttccattattatgtcattagcttcttgtttggggagccttaattaaatatgttaatgcacggagatgctatgcacttggtcaaccctattacaaattggtatctatgtcctactagtaacccatgcttcattataaatgataaaagaagtcactggctttgggctggatttcattttaaatgttagaatcaacagagagtagatgttttaaaccatgatcaaaatttcatccagtgacttttcccctcttgcatataatgcatgacttaactatacctcaaaacaatgtgtttcatttgggggacacaagaaatttcattacacggtaaaagataaaatcctaatagctaagctttcctcttctgtcctgtgcatctgccttggcagagttagctttatgtttcctgttacagcttttatttgaaggaatagattggcagctatgagtgcggtgttaaaatgttaataagtaaaaggcaaatttaaaaatatcattgacatatggacctttctgtaaaggctgtggcttcatcaagtatggaaccatccattttctattaaaagctttaataagtgttgaccacctactccaaggcaggcagaatgctgagactgaggtactgggacatgctgcacagagttccccatctaatacaggttggggaagaggtgagtacagtcatcccttagtatccacagggtactggttccaggatacaccctccccaccttcagatgccaaaatttgtggatactcaagtcccttatataaaatagtgtagtatttgcatataatctatgcacatcctcttgtatactttacatcatctataaattacttaaatacctaatgcattgtaaatgctatgtaaatagttgttacactgcatcagttttgttttgttttgttttgtttttttgagacggagtttcactcttgttgccaggctggagtgcaatggcgtgatctcgactcactgcaagccccgcctcctgggttcacttgattctcttgcctcagcctcccgagtagctgggattacaggcacgtgccaccgcacctggctaattttttgtatttttaggagagacagggtttcaccatgttggccaggctgatctcgaactcctgacctcaggtgatccacatgcctcagcctcccaaagtgctgggattacaggcgttagccacctcttctggcccagtttttaaatatgtactatttattcttgtattgatatttttactgtttttctttcctgaatatttttttttcctgtggttgtttgaatctgtggagacggagagcctggctgtacagcgtaagtgctctgatggctgtgtgcacaaagacctctgcatgcacaggcctggtgccaaccccatcccaagagcatctgggcttacagtccatgattacctgggtggtccctatcttgtgctgacaattgttgagtaataactgcaactgtaatatgttggtgggaaaactacttagagaagtttcccattggacaattgaaaaatgggaattaactagaaatgtaaacattctgaattctgctttccttgcctcatgcatgctcattctccaagtcaagaactcttgggtcatggggacaagaggaacaggacagtccctcctcttggaatcaaatagagaatgcagataagaattcccacaattataatatggtgtggtggggctggcttagaggaagacagcttgcaatgagaactgttagaagtggtgctttacaggcgtggtagggtaagggcctcaggatcccaggatgaaacgagttaagacctgaaggatgagtagcagctgatcaggtgaaggggtgggaggagagggtcagggaatgtgccaaagagagcccagcacctgcctttcccatccatgttctctgtctgttccagctctgtgataaatgtcagcaattagcccagcccttagtacctaacagagaagaaatgcattatgctgcggttttatatttcagtcggaagatggctggagaactagttaaacacgtgcctaggaatgttctctgaaaggccagctggttgctgctggttgatagagctgggagtttattggcaaaaggtggagagggggtgagaggacagggaagaggtaggtattaagccagagaaatactagcagtctggagggattccctacaagatacacaatcactttgaactttataaaaatagactcttactgccctttccatgtgacaatctatgctttttttatgatgtttttgcagctgccctacctaaaaggatcattataaagatccagcactaaaaaaatgtttttaggcattgatggtttaaaaaggagtctttggaactctataaaatgttttaatctccttggaataaaaaaaaaatgcaagtccagaaacagagcccatgcaaagaacttccagggctcacgtgaactttgagaggtcagccctgtgctggagctgtgcttcgtagcccgggtgcactctcccaccctacctgttactgtggcagaagtgatgagaatccagcccacttcacctcacgaattccaatttgcttcccttccttaaaggcctcttgcattcagagacagcacccacatagtttagtactgattgcaggcaaggggtgaatgttacttttatttttccaaattggttatgacttccctaagggcaaataatccattgactacatttcagtagaggcacacacgtaagaatcttttggacattttggtttttgggttttgtttgtttttttagaatgtaagagaagatttcctaagtagcatattatttgtatttccttttaggaaatgcttttcttatccaactgaaatctttcccggtgtaattttcatgcagagaactatacccttcaagtactagaagatacatttctttttttttcttttgtttgagaaggagtctcgcgctgtcacccaggctggagtgcaatggcgtgatctcagctcactgcaacctctgcctcctgggttcaagcgattctcctgcctcagcctcctgagtggctgggattacaggtgcatgccaccacgcccggctaatttttgttttttaatagagatggggtttcaccatgttggtcaggctggtctcaaactcctagcctcatgatctgcctgcctcggcctcccaaagtgccgggattacaggcatgagccacacgtggcctacatttctattatattgtgtttaaccctatcttttgaaagaataaagaataattttggctgggtgtggtggctcatgcctgtaatcccagcactttgggaggctgaggtgggcagatcacctgaggtcaggagttcaagaccagcctggccaacatggtgaaaccctgtctgtactaaaaatacaaaaagttaaccggacatgggggcacacacctgtaatctcagctactcgggaggctgaggcaggagaatcacttgaacccatgaggcagaggctgcaataagctgagagtgagactccttctcaaaaaataataataataataattttgattgaattctttaaacacatttctaccttaatagaacttctattttggctgaaattctcaaagagcctttcattcttatgtagttgactttaccaattaggtttttccttgctaagttttcttttcattttagtttgtgttgctctcatttttttctttctgttctttcttttgccagtagagacatagttgtctaaaacttttgaaatcagatttcgtttaagttttagaactacttctgtgacaatgtctgagcacagagccactgatcgtgcctttctattcatttttctctctctatacccaaatagcaccattctaactggatttcagtaataactgctttagggtgatagaaagcccaagatcaagaatggagacttcatgtataggctgtagaaaagtcagtgggccaacagaaagagcaccttctgtagcaaatgaggaagaagataaaggaaggaggacacgggaattcgtgacgtatcactaccatgatggaaaatgatcctcatgtttgacaatcatacatttgcttgtagaggatcaagagcaggatatgttcccttctgctccttttctctaagctggtcagccttaggtgtgagatgtagattttgaccctcggttttaaaacacccttatgtatgcaagtaaaatgtaattatttatgagaatgcaattcgtcattttttttcttggacttgggagtttgttgccttttacctttagttgaaatagcttctatttaaaagtatcacatcaggaaactcatctctcttctggtaaatgtctgtactttcaagtggtaaataatctccattgcgttctaacgatacatctgagctgcgatattggttttccagcagatgtcctaagagtttagaatgcccttaacttctcagttccaatgtcctggcagatcaagtggactatttaaagatggatcaagaataggagttatatacacgccttcttgcctggtttttcaaacagagagaaggcaaagtagattcatcctattaaatactacatgtgcctcaagagcatgtcagtgaaatattgatcaaaatattgtcctcttttacccaggaattataggatgaagtttatttttattcgtttaattaaactgcatgttgttttaataatcttttttgtcagtcccttgcccatttgaaagttgcttttcttaacatgaactgttaactagaagcttttacttccctgttagttccaccttagaggttgcctttattctactgaaagtgcttatttgtatagtatattattttattttttaaaaataaggtataatttacacggagtaaaattaaccctttttaatgcacaattctatgtttttttttttttttttttgagacagagtttcactctggttgcccaggctggagtgcagtggtggatctcagctcactgcaacctctgcctcctgggtttaagcgattctcctgcctcagcctccccagtagctgggattacaggtgtccaccaccatacccggctaattttttaaaaaattatctttagtaggtcactcaggacttgcttagaaacggggttttgccattttggctaggcttgtctcaaactcttggcctcaagtgatccacctgccttggcctcccaaagtgctgggattacaggcatgagccaccgtccccagccatagtactatgactcttgacaaacacataaaccagtgccatcaccaggaagtgggcttgcttcctactacacccagataagaacagtatgacactggctccaaaaattccccagtctcctctgtagttaacccctgtccccctcaggggactcagttcctggcaacagctggtctgttttctgacctatagttttgcatttctcagaatgctgtatgaatggaattgtacagtattatgaccctctgattccaatttcttctactcaatataatgcatctgagattcatccatgtcgttggatcagtaatttattgcttttattgctgagtggtattccattgcatgggtgtttcacagtttattcattcacctgttgaaggacatttgggccgtttcctaattttggtgattatgaataatgcctctgtacacactcattttaggttttagtgtaaaggtagtttccattttacttggcaaataccttaaaaaatggggatcagtttcatttccttattcagcgttgctgcatggacttatttgcctctcctcctcactttggttacatgtgggaaaagtcaagcaaaaacttggcccaggggcctctggttccataacaccattggccgggcctctctgcctcagggcctctccggcataggtgtcccatggttggggagtcctggaagtccagctttggggtctgggaaccagggaaccagggatcagaaagtcactggactccagggactatatcatagtttaaagaagggcttgagtaaaatgtgaccagaatagcattgacagtaatcaagcaagacgatggtagaagacggaggagttggcctggtgaccaatgcctgccagccctttctgcacagaagaaatgccaggacccacagacatggctttccctggaaccactcctctgttggtggtctcactggtgcctgccgctagcagagagcagcatggttacaggtgaggccccgcacccaggccagctgtgggacctagtttccagctcaagccgtgaaaacttggctgcacctcctgacccatctcagcctcattatcctttcctgtaaagtgaggaaaatagaagtacatacatcaaaaagtttatgagggtgaagtaaaatcatacaggacaacctttagcaaagtgccgaccacagagtgagccttcctctttgccatttgcagtattttaaggtatttaacatcgatagaccatacaattatggcattgttaagagctggaagctcttctagtctgttgttccccaaccacagggttttcctatatgagtttacttcatccccacaaaccttctgatgcatgtccttctgttttcctcactttatagaagaagacactgaggccgagaggggttagaaggtgtgcccacgtttgcatggcttgagctagaagccctgtcttccaggtggcctggctgcaaccctcctaatccagaatcttccccacaacagcatggcagtcactgatgctctcctggaaaccttctggggaaggggctaagtcttcccttgctctaccttaaagacagctctaccttaaacatggctgttatatattgcaactatatatcattaccatagagcaaaatcaccatgattacatctgttagattaactcttgagtgggcttgcttcctgtttgtgcattcagaataattggtgcgctaagaatcaattgtatttcagcagtgtggtcaccagtttacaactgagaaatcattctctgcacatcatctgtggcctcatcttctcccctgacccaaattggtatttatagatttcattaattagcctagaatcccagaagctcagatgctttgcttgagttacatgaagagcaggtaaatgaaacatgaaaactgatgtacttgtttctttaaaactcatgccccagggtgttgagaaactcagattctaaacagaaatagtgaacgctggttgaattgaggatggatgtgtggtccatggtatttcaaaatcatagatatatagatcttttaaatgacaataatgttaactgtgtcaatgcttggaaataatggaattatgcttggaattaagttaaaattcagtataaaataatagcatatgcagtcactacaatttgtaaaatattaaggatcagaagacaaaacacaataatgtaattaacttgtttcgaattttgtaaaatgattttattgcaaagttagctaaaaataaaactctagtgtttaaacaaaacaaaaccagaaaaccccactactgataaacaacctcagcaaagtctcaggatataaattcattgtacaaaaatcactagcattcctatacaccaacaacagtcaagtcaagagtcaaatcgggaaaacaatgtcattcacaaatgccacaaaaagaattaagtacttaggtaactagggaggtgaaaggcctctacagtgagaaatacaaaacgctgctcaaaaaaatcagagatgacacaaacaaatggaaaaacattccatgttcatggataggaagaatcagtaaaatggccatagtgcccaaagcaatttatagattctatgctattcctgtcaaacgacaagtgacattcttcatagtactagaaaaaacttttaaaattcatatgaaacaaaaagaaatgagccccaatagccaaggcaatcctaagcaaaaagagcgaagctggatgcatcagtgttacctgacttcaaactatgctgcagggctacagtaacccaaacagcatggtactggtacaaaaacaggcacaaagaccaagggaacagaatagagaacccagaaataagaccacatacctacaaccatctgatcttccacaaagctggcaaaagaaatggagaaaggactcactattctataaatggtgctgggataactggttagtcatatgcagaagattgaaactgtaccattccttacatcatatacaaaaatcaactcaagatggattaaagatttaaatgtaaaacccaaagctataaaaaccctgaaagataacccaggcaataccattctggacataggaatgggtaaagatttcatgatgaagatggcaaaagcaattgcaacaaaagcaaaaattgacaaatgggatctaactaaactaaagacctctgcacagcaaaagaacctatctacagagtaaatagacaacctacagaacaggaaaaaatgtttgcaaactatataggtccaaaggtctaatatctagcatctataaggaacttagacaaatttacaggaaaaaaagaacaaccccattaaaaagtgggtaggctgggcgcagtggctcatgcttgtaattccagcactttgggaggcaggcagattgcttgagcccaggagtttgagaccagcctgggaaacatggcaaaaccctgtctctgtagaaaaaaaaaaaagtccaaaaattagctgggcatggtggtgcatgcccatagtcccagccacttgggaggctgaggtgggaggatcgcttgagcctgagaggttgaggtgtggtgagctgtgattgcaacattgtactccagcctgggcaacaaagtgagaccttgtctcaaaaaaaaaaaaaaaataagcaaagaacataaacagacacttttcaaaagaagacatacacagtggccaacaagcatacaaaataaagctcaacatcacagatcattagagaaatgaaaaatcaaaatgacagtgaaataccatctgacaccagtcagaatggctattattaaaaagtcaaaaaataacagatgttggcgaggtggtggagaaaaaggaatgcttatacactgttggtgggagtgtaattagttcaaccattgtggaaaaacagtgtgatgatttcccaaagacctaaaaacagaaccaccatttggccaaccaatcccattactggatggatacatacccaaaggaatataaatcattctgttataaagacatatgcatgcatatgttcattgcagcacaattcacaatagcaaaggcatggaatcaacccaaatgcccatcaatgatagactggataaagaaaatgtggtacatatacaccatgggatactatgcagccataaagagaacgagatcatgtcctttgcaagaccatggatggagctggaggccattatcgttggcaaactaacataggaacagaaaactaaataccacatgttctcagttagcaggagctaaatgataagaacatacagacacaaagaagggaataacacacactggggcctattggagggtggaggatgggagtagggagaggatcaggaaaaataactaatgggtactaggcttaatacctgggtgatataatctgtacaacaaaccaccatgacacaagtttacctatgtaacaaacctgcacatgtatccccgaacttaaacacacacacacatacacacacacacacacacacacacacacacacactccagctactcctactaagcagtccactctgcctggaagttgctggaaggactccatgcgaaagtggtttctctcctcccagaacatgattttactggtttctttcaaagcctattcatcatcctcccttcaggacactcttaaaatttgccttctgtggagctctttaccataagaacaagcaacaatgacatgttccagcccattagtgttaatatttgttgatccgaagatggaaaatacattttactagacccttgtttccttcttgctgctgagtatattttcaatctataaagcttagataaatttcgtatatgctcacctttttttgtgggagacttgcaagagaaacctaccctaaaagctaacctagccaccttctatttgcagaaataaagcaaaaatcattttagtgttgattttgatgtaccagaacctaaattgcttaaattaaaaactttttagagcagtgtgtagaattctatttgtgtccgtgagtatggctaataactccattttaagaaccagaaaaggaaataaaataagttaaccatctcccttgagctgcaaaagttgctaatcaaaaacttcatgtaaacaatgtaccgatatcagactctggttatgatctgtatacatttagtgtgcaattcaagtataaaggctttcattttttggcagcccagatgcaaacaataaaataatcctgcttatttcctctcagcagcaggttttgtcatccatatgtaactgaccgaacagtgtttagccacaaacagaaaacactttctgcaggtggttagttgtctttaatatgtctcatcaagcctatctgtgtgcttctgtgtgggctgctgtgctcttcaaggcctaggtcaagtgccttggccagttagtggttagataattaatagagactcactaagtatgtattatttaccgactaccactttcctgattgctttgaaactaatgaaatgaacaaaaaatgtaattatggtccttgagggaatttatgatctagttagaagggttaggaaatactttgggcccagacacagtggctcacacctgtaatcccagctctttgggaggctgaggcaggaggattgcttcagcctaggcgttcaagagcagtgttggcaacaaagtgagacctcatctctacaaaaactaaaagaaagaaaaaaaatagccgggggtggtggtatgggcctgtagtcctagctagctccttgggaggctgaggcaggaagactgattaagctcatgaggtcgaggctgcagtgagctatgatcacagcacaacaatgagaccctgtctcaaaaaaaagaaaagaaaaagagagagagagaaagaagaaaggaaggaaagaaggaaggaaggagaggggaggagaggagaggagggataggggagagaggggagggcaggagagaagagaggagaagagaggagaagagaagagaagagaagagcaaaactttggaattgtttcataggagtggtaccttttcccacactgactgtaaaaagttcagagaaacaaagggattttcacagcagtgcttgcaattccaacatctgccttgtgactttcaattttgagttaatatttgaaactgtcttcgttgcctgcataaagtgatcaagtgaccatcagtacaaagactttttcacatacctgttttaattgctctggagaatgcctgattctctgagttattgcctagaggttttcagagtaaattacaagagtactacatagactttatattaagtcgggtcaccccaaatattttatgaaaacctgcccagccatttctacatgacatggtaacaagcatagagatgaaaattttatttatctagattaggcaaaattctcctatacgctatgtttaatgccatgggttgtctatattttatctttatattgtgcaaatgtgtgtatgtgtattatacacacatgtatgtagaagtacatatgtgtgcacatatatgtgtataattgtatgtacacaagtacatacatacaaatactacatgtactatcaggctttctcaggggagacttagtgtttttttttatctttactggaaaaaactgttgttggtaatagcaaagacattttgtgttagccattaacgagatagcagagaaatcctttgctatctaatatgtcacggtgaaggccactggtatgagcttatgttgaaattcaggatttttctgatgtcatgagtgtactcaggtgaccacattttgaatctttttacttttaaaaacaattccccaccccagttctttagctgagattgtcatttgaagacgtgtgccctgttcatccagttgcacatgaccagaaggccctggagaatggtttaagccattttgaagagcacagacatgggggagaaggaggtaatcgtcatcaatacatcatccctacctctttcaaacttctgtatatttttcgtacttggttggtttgtttttgagatggggagaagacagagggaggacagaggctctcaaggagtttgtgagtttagagctggcctgatggccatgagcagcatgttttccatcttgaagaaagaagaggtgggaattcagaatggtgcagctgccttggtaaaaccttacggtggctttatttctacttaccaaatactagaaacaacctatatgtcccttgactgagaagtggataactgtgcagtatacctatgcagtggaatattacttagcaacaaaaaggagcaatacacagaatacagtgctttgctgtgcaaatgcattgtgctacatgaaagaacccagactcaaaaatgacaccctttcgtatgattttgtataaatgcatgattccacttatttgacattctgaaaaagacaaaaactgtggggaccaaaattagatctgtggtttccagggtctttgggtggaggaaaagggtgactacaaaggagcacaaagggtttgggagagtgacagaaatactcggtgtcttgattatggtggttacacaagggtgcgcagttatcaaaactcacaactgtacattaaaaaggatgaataattattgtatgcaaactatatctaaaaataaataagaaacagatatatatattccagtaattgcttcttggtatttgaatcaggccaaggataacatctatcagaaaggtcttttattgatattgaaattctgccccaacgcattccctctcctacacacacacacacacacacacacacacacacacacacaccttctctctctctctgcctgcccccaccatctcatattttcttgtaatcatttttatgggatttataggatgtccagctcatgcacaagtgtcagcctcttgtttgtaatctcggtagctcagcctcccgagagtgatccagccatccatgactgagttttgattcaagaaacaggactgtgatcaagatattaattctatgcattataaaccagggaacagttggaaaaaaactaaagcttagtctcctttaagactggaaaagttgtactttatatatgcatatgtgaatagtagcagggaattttcttgcattcaattttctcattcctgagaggttagatggttcaaatgtgctggggcagggagggattttcactcggctgtcagagcttcatatccctcactatttttgagttttaagaagatatttaaaatgcttatgtttctatacattacattaacttttaaatatgaatattatagtaaataataaatcataattcacaagtgcaaagaccttctgtgcccatgtttagcatatttggtcgatttcttttccatggcactcaatgacagctgaagaaatttctttaggatgacagattgtcagcacattgacatagattgttttagatgtatatttttagtgggaatgaatgaaatttaagtgagcttttctcagaaatatagtaataaggagaagagttgctatttcatgtgtcaagcttacaggacttttttccccctctttgggttatagtcaacctaattagcaattattaacaagtatcttacaaaataaaaagaaaatttggaatttgctgaaagcatcctaacatctactagaatagcgctattgataagtagtaaagaaatttatctcaaatctcccttgcccaagatagagaaaaattaattaagaatactctagaatttttttctggtcctttattgaacttcattacttaattagtccttagagagaagaaccatcaaaacttggtaggtggtgacagcatttttttacatttatctgtgagatggaactagaatatggagttcacaggacagcatttcactaacatatcttttttttttttttaaaagacagggtcttgctctgtcacccaggctggagtgcagtagcacgatcttggctcactgcaacctccacctcccaggttcaagcaattctcctgcctctgcctccctagtagctgggattacaagcacctgccaccatacccagctaatttttgtatttatagtagagacagggtttcttcatgttggccaggctggtctcaaactctgacctcaggtgatctgcctactttggcctccgaaagtgctgggattacaggcacgagccaccgcgcccggcccataactagttttaaaactatgattacttcatagaatcctggtttcttcagaaaactactttatcaggatgaagggctaattgtgtggttatgacctagttactgctggaagtgctggaaatcattcaataagaaggcaggtgtgtgttgtttattacctccaaacatttgggaccctctcttcactgcataggggccgtgagtactggagttccaaaaggagagtgggacacacatgaaacccattttaatgaaggaatgtccaagctggttccccagatgctgaaattagatggggacctactggggaagagccatttccaaacaggagagaacaggcctagcttcctaaaggactgtctcagatcttcagcactagcccagagggaagtatttctccacactcacttgaaatggccactgtgctacacagagcccttatctggattccttttaaactgcaaagattttaaaggagagatctttatgcttttttaaattccaggtgtattactcattaaatatggacattgtagccaagaacagtgtagttcccatggtagtggaccgtattatattttatttagttcttctatattacttggttttttttaaatctgtgtttggctatttaaaagtttatactttgatcaaatgaataatatctagtatttgatagcacaaccaggtgactatagtcaacagtaatttattgtacatttaaaaataactaaaacagccaggcgccatggctcatgcctataatcccaacactttgggaggctgaggcgggcagatcacctgaggtcaggagtttgagaccagcctggccaacatggtgaaaccccatctctactaaaaatacaaaaattagctgggcatggtggcacacacctgtaatcccagctgctcgggaggctgaggcaggagaatcgcttgaacccaggagacagaggttgcagtgagccaagatcgcaccattgcactccagcccgggtgacaagagcaaaactccatctcaaaaaataaataaatagctaaaacagtagaattggattgtgtataacacaaagaaaggataaattcttgaggtgatggatacgctatttaccctgaggtaaaatacctatttcaaaatatctcatgtaccccataaatatatacacctaatatgtatccacgaaaactaaaaatttaaaattttattaaaaaataaaataataatttacattttggtaattggttatagtacgttcttaagagaaacaaataaaactttacattaactatttggacttgaaggaaacgatttcatctgcaactatatagactgttaaggcccgtgttcccacttttttaggaatttgatggagaggttgtcttactaccataggttttatttggtttaggtttccttttctatagtatttttacattttaaagggcccaaattgttcatttaatgggatgactgttaatgggtggagtctcccagggccgattagctgtttgaatgcaagtttattactcataatggcactttttttaagtgttaaagttttggtaaacatttcatctgaattcataaaattaaaagtgttgatatttcattataactgaagggagaaattgtatagaattagcagttgattccgtttggactgtgaataattatctatgggaagggtaccctgattaaatctgactatttaagagataagtgaatcttaaattcttaatttacaaaagtttgatctatatccaatgggaatgaatctctttttgtattccatgattaattttttttcaagaattccttaactcccatgttattttccctgtttaattttgcagaggctatgacttcctcaatgcaaggttccttcacccttgagaatctcctggttactaatggccaccatgtgtcacataatgagcttccagactgaaatcagaccaagtttgtttcatttgcactataagaaatggtagttattcttctgtgaagacatatatagaatgagcagtgatgcatataactgaaaatccctcagggaagcatttgttatttgtgaaaagtgtcatctcgttctctaagaacttcctcagctttttctgtttgtttaggggagggcacaggaacatgatggcatggtgttacatttggtgatttggtgcacacaactgtctgtggtcatgcactttgatgtaactcttgtccaactggcctatccaaagtacagatatatcttcttatagatggcttttaaaaaaaagtaaaaagcccatcctcaatagataaaaactattgcaaacaattttaaatccttaataagaaaataatttcaaattgctgtgcattgacagtatttgaaggaggtggggatgttataagggatggtttttagaaagaaagagctgagagacatgaattttgcagtgcagagaacatgagctttagattcaagctccagttgaatgatctttctgtacttcagagtcataattataaaataagatttagttgacctctgcaggtagtagtggcagttaaatgatgcaggggaggcaaagctttacctctatcctcttagggtcctggctgggcctgagaattaaatggacatgacaaattaagccaggcacagtaatcccagctactagggaggctgaggcaggaggattgcttgaggccaggagtttgagaccagcctgggcaacatagtgagacccccatctctaagaaaaaaaaaattgacagaacaaattaacaggagaaaagcacaccaatttatttaatataagttttatgtggcacgggagccctcaaaggaaaataaagattaaaaaaaaaacacagtcagttatttttatatattgaattggacaaacaaagataagttgtaaaatgcgataaggccagcaggcttggcctagggtaggtaattattggagaaggaactaggatgataagggttagttaacaacctttgtgcagatttcccttggattcaaccttctatccttgatgataagaatgctactttccttttggggtaggaaggacatctttcacatgggagtttcacctcctgcctttaagaaacagaacgaaggtcacagtgatcttcttgtgcctgctgttttttaggttcccttaaatcaaaacagccaatatgccagaacatcatatttttaactcctttggtggcatgaatatggagctcctacctgagtctaaacacatgcagccgcttcccagacacggaatcattgccatagatgattatgtgggatctgacagaagtttgttacttgaaaataatttcacacaagtcttccacgttggagggcagctgtgggctgcagaagagcctggagagagtagtccctgtggccttgcctccgtccctgagtgtatttagatgaacaaggacctttcccctgaacatttgtctgcatggatttttaaggactcccttctctggaagctgccctcaaagcatttcaagtgctcttgctgatggcagatgaagctgccgtaaagcagggggatgtgattgagcaaaaaatcttttctctttcaacccaggagagcaaaatagtaactctacttcatgaaaacaaaattggctgtttccaatagagcactcagatcttcaggaaaatgtagcatatttcctaaaggaggttaaaggtgaatgaaacctttgctggtggttccatatattctaccataatcgtaataacaacagcagctcacatttattgggccttttaatgtaccgtccattgctttaagtgttttacacatactgtattcacttatttaatgtccaccaactcctaagtccctgttagatgatcttcattttacgtgaggaagccaaggcacccagaggtgcgatgtaacttgtccacactcaaacagcagcaaagctggcatttaaaccagacatgctgattttagaacactaactgcatatgctgcatctataatgagtaaaaatctataacaggtaaaaatgtacaatggagaatggtgggaaccagtaccaggaacctgtgcagacctggtcagagcaggaaaggaaataaacacagttacatgattataaaacaacaaattggataataagatcagtcctgaaaagtcaaccaaaagatgctcacgccagacattattgcacagtatcttgaatcaggcccagatatctaaaataagcctctttcccgtgatttttcaagaatcttgcttattatatagggtgcagcaactcattttgactttaaaggagtagtgtggcaggctcctggacacctggaggcactatatgaatttctgcctaaaaattcatccataggaaggagatttgctgaactgagaaagtgaacatttcacaagaagtacatatgtctccatgctaagaagtaactccctgggcgatcgccgtcatgctgagtgtttccatctccaagccctgctgcagcctgcctccttgtctccacccatgcctggaaaacctaaccctcataaaaagtctcagtaagcaacagtgagaataactgtaaggtgttacaggagagatggttttggcagccaaaaagggcttatgatcctaagatccaccttaaaagtgttctgttgcccagttctgtattaattctgagcagaggcagcagaaagcatctttcagggtcgagaatttctgagatcttgaccgtcaggaaaaggatgcttccaggcagccgtggaaactgaaatccgagccctaatcttgctcagagctgctgaggtctgtttgtaggaaaacatcgggttattgtctgaataacatacatccaagttacaacgggaaaagaaatctgccttatggaaagagaatgaacatttgctgggtagagtttatgcctgcctagatgctccacctccaggctctaggtactctacttcggagtgcagtctgcgctccctcttctgggatggctgcggagcccagggcatctctctctaaggctttcaacaagtcttatgggctgtctagactcgctgtcttggaatgagttagtgctctgacctgaggaaaattccccatgtttctcagtgtcaagccaaaatctctagggcttcagtattgccccacggttctggcccgctggccaaacacataactctttttgcagctcatacaggtaaatgtgagccagtgctgctcttacaacctgcctcccacatccctgtctgtgggtggctctctcctgaagatggtacttctccagaagtttccaaatgatcagagaggaactgcttctgggtactcctccttctccttcttcttcttgccagaggccttgaatttgctattgagagatttggcaatatactttgaaacgtgaagataatgaagttgttgggtgtgaacaaatgttacttgactatttaaatattaaaaatatgatatacatggtgtattagtccattctcacactgctaataaagaactgcctgagactgggtaacttacaaaggaaagaggtttaattgactcatagttctgcatggctggggaggcctcaggaaacttacagtcatggtggaaggggaagcatacatgtccttcttcacatggcagcatcaaggagaagtgcagagcaaagtgggggcagaaagccacttataaaaccatcagatctcgggagaactccctcattatcacgagaataacatgtaggtatctgcccccatgattcaattacctcccaccgggtccctcccatgacacgtgaggattatgggaactacaattcaagatgagatttgggtgaggacacagccaaaccatatcacatggtaacctacgttagagattcgttgtatgaatagcagaactttaaaaagttttgccttgcagaaaacagttcctattattgttacaaataagtatacatcatcttagaacttgtctttacaaatatgaacaatgagtaatggcagggaaacaagtggttaagattcagtgattgaggctcagtttctatactggcaactccatggagagcttgaagaccagcagctacattccctgtcttgatcatccgggggtaggaaaagcattgaaagatgggatgactaatgcctgctaaatgctggccaactttaaaaaaaattgactttagtattatgagatacgaatggcatattttaattaggaaatacagtaatcctaagtgagcttcatttcttacacaaaatataggaagatgatacatgttcactgtgcttgagaactttttctcaaattcaatgcagaaaggcagtctgtgaggcagtaggaaatgcagctgctggaattctgttatcagtatgtgtatcagttctgattgagttgtaaaatggaagcctgatgtgctggatattaatttagcaatagataagtctgaaaatagacttaccttcaatttcatcataaaagtcaacctcccacctaacacgttgaaactcctgtggttgtgaaagaagaaaaatgaagttccacttccctttcattccatgagccccttcagtggttactgcctcactagaggtgcaagttactagaaccgcagaatataaactgttacataaaatgatgaaatatgcgcacagaaaataagggagctttttaaaataaaaactaatttgtatgctttggaaagactcaaaggtgagtttttttttttttaagctaattagatatgggtaagacaactgtgaaaaactggagaattttttttttaaaggcgtgaaggatgtacactcaaattgccttgtaatttttcctttacttaaaaccctgaaaccggacattttctaactgaaatcacattgacactctgtggtatctatgtgtgatggagaatatggagccaggagagcagttcttggatacagaaccacattttggttgaatgactttatgtttatgtattcgtagttaaatgcaatatgtatgtggtcaggtttcatggctttttcaagtgactaactacaggtcttaagtaagtcaggtgacaggattgtaccagatgtaaaaaacgagtttaatataaactcatcaatttgttgaaactgaatatcaaaatgagaacctcagtgtttggggaacagttaaatctacaacatagtaatttagtagaggttcatggagtcaatttaaggaatatcccatgatatgtaaaaatatatatgtatattattaaattgtatatttgtaaagatgtggcccagatataaactttatttacctccagccatataataagtaaatatcacacagattagttgtgcagtccaactctcgtgcgtgtgcacagatcagcctcgggaccaaaatgccacatccctcttccccatatgttagtattgaagttctgccaatccttcaaaaactgactcagatgttaccattacctgaaggctttcctaagttctccacatcaaactgtggttcacttagccaaacctgtttgttgttaatacgttggaatattacctgctgtttcctgtagctagaagtggtgcttagtactatggttttcggaatcacagtactgaagaggcatctgagaactgtgtatgtgtttgcacacagtactcaatctctagcttttctaaaacgccatctctggcacatttgcttaacttattttaaagagcacacactgaagtagtatgacaagcagcacaagaacttctgttttctgtgttggaagaaataacaaatgattatacacagcaaggacaaagagatgagtttttagagaaaaaagcacattagcaataatattccactggcgaagtcactacctatgcatatcatatattgtatacattggcaaagcattttgtttcaactttgccttttcgttttttccagtatgtataaaatgcttgtcttaattaatagtcattttctgctgggggtggggtaaggaatggccgttttaatgatattaatgtacagtggattcttggctgtgaaggagtgttaccaaatattacagcttgtattaaaagtgtaaagatagaaataagtggtgcctgtttaaaaagctataagatttagaagcctctccgctctgacagggatggtaaagctcattttaattctgaaatgcaacttccatgtgttttacagtttaattttctataattttaaccaattttatataatgagttttgtagctttataagtatattaatctaacaattaaatagagaaaaacaattgtttctacacgtacaggactagaatgtgtggctagtttctctcttattggtacctctacacagtggagctttctgtaaacacattctaaatatagaagtgtctttaaagatgagcttttcctctttttctgttaagacagagcttcctttgggctggcattttgtttactctgaaggggctcctccaggagagacactctgaaccccgtgcattctgggtgccgagctgccacaggctggtttggggacttctcaacttagtgcgcagaaaaatgaattctgtgaacttaaaatcagagtctctgcccaaggggacttctagcatcaagaaaaggtagaagctagctgaggtttaagaggtttgtgcaggagaaaaatgaggcgttaaatggttaaacactgccagcagatttttagcattgtttaatagttttaaattatggaggtcttaggtccaaaatgtaacagttatccaactcactgacattaaacattcagttgccagcttctgttttcttggtcattaattttcagtctatgtattttcggtgctttgctaagagttttgttaaaataacttttcttgtttgcattctcatttcctacaaattcagactttgctttagaatccaacagatggatacttggagttagcttattttttccatctaccctattttttttccttctaccttttatttaatgaggaggccaggtgtggtggctcacacctgtaatcccagcactttgggaggctggggtggacatatcacttgagcctaggagttcgataccagcctgcgcaacatggcaaaaatctatctctataaaaaatgcaaaaatacaaaattagccaggcatggtggtgcacacctgtattcctagctacttgggaagctaagatcagaggatcacctgagcccagggtggtcaaggctactgtgagccaagatcatgccactgtactccagcctgggcaacagagtaagaccctgtctcaaaaaaaaagaaaaagagtaacaaagtaagatatcttttgtctggttataataaaagctgtagtatgtataatttactcaaaagcagagcttgctttggaaatctctacatgcttgaaatttaaagcagtgcatatatagtctccatatgtattccatactgtaaaccatgatggtgttccagggattgagtctgagtgtttataaaatggcacatggcacttaattttgaaaccgtggaaatatttaaattactgacttgatgaaggctatagatcaatgtaagaacttattagttctcacattgatttggatgcattcaaagatgctaaatgattgccaatatagtttttttttctggactatttaattcatggtaggtatatccagtatgtataagaaagtaaaaaaaatgcaaacactttaatctcaaataacagtatgcagtgctctaatataatatcttctactctgaagggcaggtcataagagcaggctcctggtgatgagatgggagatcattcttcatttgttggaagatcaactttatttcatgccctagaaatgcttgctttacaaagaaacatacgtagggcagcatgtatcctgaggtttccaaaagagaaaagatttgttcacaggggtaagttgaggaggcgggagaacagctctcaaatccacctccctgccgataagacttaggaatatttttgggttaggaagtaacaggttcatttgtgcaagcgtatttggggttcttggcacttcatatgacatatatacagaagatggcagctttagcatgatctgtgggtggagttttttggccctctggcttcaaaaggccacctctcaggcatttgcgcaggcccacttgaagggttggtggtctcagctggtttgaagtgaacagcagctggcccaagtttctgaaaaacagctgaagccaacattaccaggaatgtcatctgtaatgcagccagtaatggttaagtttcagtgttctgtggcacggccttcaacttcatggaaaagggacaaaaataacataaagcaagtggccaaaagcaagcagagcaggcagttgtgatcagattaacctcttggtttcactgctatgaacatctgtatacaggttttttgtatagaaataggtattcagttctcttcaatacctagaagtggaattggtgagtcataatgataacgctatctttaacattttgaggaactgttgaactgttttctgaagtggcttcatcattttacattcttaccagcaatgtgctaggttccagtttctccatatcctcaccagcacttgtattgtctgtctttttttactataaccattctgatgggtttgaagtggtatgccattgtggttttggtttccatttccatgatgagtaaggatgttaaacatcttttcatgtggttattagccgtttatatatcatctttggagcaatgtctattcagattctttgcccatttttggattgggttgtctttttattgttggactataagtgttctttatgtaatctatatacaaatgccaaatcctatatgagatatattatttgtaaatattttatcccattctgtaggttgtcttttcaccttctttatagtgtttttttttttttagcacaaatgtttgtaattttgataaagtctaatttatctgttttttcttttgtcccttatgcttttggtgccttatctaaaaaattactgcctagcccaaggtcaaaaaactttactccattttcttgtaggaattctatagattcagctcttaaacttacgactgttatttattttgagttattgtttgttaatggtgtgaggtagttgtccaacttcattcttttgcatgttgatatatagttgtaccagtaccatttactgaaaagactattctttttcctattgaattgtcttggtaacttgttgaaaatcaattgactaaaacagagaggatttattcctggactctcagttctatcccatttatttatacatctatctgcaaaattattttaataaaaacaaatagtgagcacattaatccagtgtgagtaattcatggatccattactaaatctttgtgaaaaatagagaatggaaaagtatctttaatcctgttactgtaaatgttttgctgtatttcccttgagtagacttagaccatttaattcctttacaacagctattcctacctgtttctttttttaactcactctgctcatgttacttcttttcctgtgcactcgagaagccagaagtaacactgcaaagcacaataacccctaaaatcacttgtctgtctcacacacacaggaagaaaggaataaagggtaaatttccttttaatattttatgttttattgttctttttttctacagtaagctactcatttactgcatctgatactgaggctctacagtagccatgcactttagtctgtctcttaagacacttttggagatattttcatcagtggtttaaatcacaagttgcctatttaaagacaagaaagagagcattctgaacaaaacataaacattttttagcccaagttcaaactggcttttttgctccccaagacttttttttttttttgagacagggtcttgctgtgtcacccaggctggagtgcagtgccacagtcatagctcactgaagctttgacttcttgggctcaagtgattctcccacttcaactttctaggtagttgggactacaggcatgcactaccatgtccagctaaatgtttaaattttttgtagaggccaggcatggtggctcactcttgtaatcccagcactttgggaggccgaggaaggcagatcacttgaggtcaggagtctgagaccagcctgggcaacgtggtgaaatcccatctctactaaaaatacaaaaatttgctgggcatggtggtgcatgcctgtaatcccaactattcgggaggctgaggcaggagaatcacttgaactggggaggcagaggttgcagtgaaccgatatcatgccactgcactccagcctgggtgacagagcaagactccatctcaaaaaaaaaaaaaaattttttttttgtagagttgtctcactgtgtcacccaagctgttctcaaactcctgggctcaacctcccacctcagcctcccaaagtgctggtattacaggcttgaggtactgtgcctggcccccacaaagactttttatacctgaaatacctatttaaagtatatttctacttaaaattttttttcatctttcagatacactttaatacccatgtcttaacttttacaaaccactgtaactttataaacagagattacttgagaagcaaactggcaatccatattttcagagagctgagaggttttccacagagctgaaagagaactaaggaatacaaatctcagaaggaagaattgcgtcctacctaagaggtaggcatgaaggacacatgcactttttgcaaactgtgctgttgaaatttacacgctacatcttcagttgtctgacttggacaatgacactgcttgtatatgaaataatattagcttaaaattattaaacagtgaaatactgcttttaaaagtgaggtgtcttcaaagatgggaacaacagacacaggggcctctgaaatgggagagggagaggccgcaggttagaaaaactacctgttaggtacttgtgttcactatttgggtgacatgatcaatggaagcccaaacctcagcatctcgcagtatacccacgtaacaaacctgtacatgtaccccctgaatctgaaataaaacaaagaataaaaatgaagtgtcttatctaaaatgaaaatctatattgctttgccctttcaaacttaacatgtccaaaagagagctgttgattctttcatctcaacactcgttcttcctgctttgtcttcccctgccctgtcctttcccctccctttgtgatccacccctgctgagcttcccaccttttggcaccacgctcataattccttattatgctccagctgtattgccctctttacttatctgaacaggtggcacttttcttcctctagctgctttgctcccaaatgttctgttcccttttgaaaggttggtgggtctctcctctagctcacaacaccctgtgttcttcagagctctgatgttcttatttgtacgtttccttctgtattacttgtgtcctcactggtccataggtgccttggagacaaggatcctatctgtctttccccctcaatctccagctcctggagtagagcctagtccatagttggtgctccataaatatgtgttcaataaatgatcaagcaggagtgagttataaccagaggtcaaaaccctggggcatcggagaagacatgcatatgtgtcaagtcgtaattaatgtgttgccccagagaggaccatgtcagctgtctgcttcctggggagctggcttctggcagcttcaaccatctaaatacagtcaaggagaaagttgcatcagttccatttgtttttgtttttccattggattttgaaccccaggagaacagttgccataacagctttccttcagcttttggtagtctctaacctccattcaatattgactactgtgggaaaagcactctctctgaacgaggcttcttactgtttctgaatttacccatacttctaatcttattgctaactaatttgtacagaagtctgtttctttagatagtaagttaaagatgagaatttgaatggagactgctgatctcgctataggcccatgcagccagctcctggccacatctcaaggctcagctgaagtggcctttcctcggggaaccctccttcaggtccttggcacattttactgtctttaataaatagcactgactccatttgggatgaaaaaagcaaatatgcagtctgttattgggcccagccccaatttaaacatcttgagggcagagaacatctgtcttttttttttaaggaaaaaaaaaacaaaacactactctatctccaaaacctgatatgtactcaatatttaataaaaataaattgaattaattaatcctttccaaccttacagatatttctgattgatagatccattgtccagcaacaataatatatgactgtgtctatcttagtaaataaatttctaaaaagctcaaatactgggacatgaatggctcactgagagcaatagggtgtggagaaagagagagagggagcgagcagagggagctggatgtacacgcagttgcagtcagtcacttgtttcctgagtagactatttgagtttttgaatggttattggtgtgattatgtctatcccatcaaattgttgatgaactttccagttttttttggaaaataaatattaaaggatacaattctgattatgtttatatttcgtttcattttgttttcaacttaccctgtgaattttgtccatgatgttatggtatcttaagggatgaatctaatacagaattatgcacaatttttgtcatttgcctcccttaaaagaaaaaaaaaaatgtccatgactatactaaaagatcctgtcatcttaactaagaggcagctgtttccctggagttttttccctcttaactatatcagctatactgagtgggatgtaatcacatgatttaaaattgataattagtgtgtgaaaggcacttggcaatgaaatacatagcaatatcagtgacataattttggcagcagaaaaatgctaaatataatccaaatgtcaatgtagaaatgaaaacagtactagctagtcaatgatttatataatgtcttgggaaaatgaagtcaattgcatcaaattttaaatcaaaataaaatatactttatttaaaagttatagaagctggaggcgtagtatacgtgtgtgttatgtgtatgtatatacagtgtatggatatatttaatatcattaaaaatgattatccttgccccggttgtacttctcttctattcataaaccctaaagaaaagctctttagatttttcttctagggcaaggcgcaatggctcacacctttaatcacagcactttgggaggcttgaagtgggtggattgtctgagcccaggaatttgagacaagcctaggaacatgatgcaactccatctttacaaaacaaaacaaaacacacaaaaattagccaggcgtggtggcatgttcctatagtctcagctactcagatagctgaagcaggaggatcacttgagcctaggaagttgaagttgcagtaagcaatgattgtgccactgcactccagcctgggtgacagagcaagaccctatctcaaagaaaacccaattgtttcttctggaagttgtcttcatatctctgaatatgtgtgcctattttgcagtatgctaaatttggttcattttagacattatcttttgacttcctgtttcaacaggtgaggatttccctctctacattacagctttgcctcctctccttctcccttcccacatagttacatctctaattttaattaattcagggatccatgataacctctttaaattacgtaaataatgttcattgtagggctaaaaagtatgatttttttttctttcttgttcaggtttcagttttctctgtggtttctaatggcctttctttttgtcttttaccctaactgcatcccacatttgtttaatactctcaagatgtaccattatagtatgtttgtctgagtctcttgtcccccttccccttccttctgaagcaccctctcctccagtccctatctggactgcttgctctctaggctctgcttgctgctggacttcacttctctttgatgctctccaggagggcaccatttcctggattccttgttttccttattcttagtttcctcactcacattcctgaagtatatgtatcaatagattcttactgttacatcagcagtatatagataagaagaaatctaaagtattgatggctcttgctgtaatgaagctttacattctttttaatgtgtgaactattaatagatttctcaggactgagatctatagaaatgagtaataggaatagaaattaaaacaaaattaagtaagatttccatttaccatttctgtgaagtataacaagtgatcaataaaataaacaaaactacattaaattatggtaaaactatatgtgtcaagtggaatggaaaacgagttcaaggtagaaggaatgatacaaaatttttgactcttcaagaaatccttgtttctattcacactagcaaagacacggaatcaacccaaatgcccatcaatgatagaatgctaaagaaaatgtggtacatatacaccatagaatactgtgcagccatagaaaggaatgagatcatgtcctttgcagggacatggatggaactggaagccattaccctcagcaaactaacgcagaaacagaagaccaaacaccgcatggggagctgaacagtgtgaacacatagacacagggaggggaacaccacacactggggcctgtgggggttggggagggagagcatcaggaaaaatagctaaggcacgctggacttaatgcctaggtaatgggttgacaggtgcagcaaaccaccatagcacatgtttacctatgtaacaaacctgcacatcctgcgcatgtaccccagaacttaaaataaaattaaaaaaaaaagaaagttgcctaagtatacagctaagagtaggagagccaggatgttagccagttggtctgactccagagtaaggtcttcagggcactgcaaagacatcaaggagttcacagtccagtgggagagacaggcaagccagccaggatgatgatatatgatatgatatgatatgatatgatatgatatgatatatgatggtatgatatgatatggtgatatgatgatgtgatataatatggtgatatgatctgatgatatgatatatgatatggtatgatatatgatatggtatgatatatgatgatacggtatatgataggatatgatgatacgatataatatggcctgtgatgaggctgtgggaacagagaaaggacactgaatggaatcttgtggaggtggggagatcatagaagcatttccagaattgaggttctagccatgtgtccccagtaccctgtgatggttaatgttatatgaactttactgagccatgggatgcccaggtatttggtcaacattattctgggtgtttctgtgaggatgcttttggatgagcttaacatctaaatagggagactgaggacagcagattgccctccctaatgtgggtgggcctcatcccatcagctgagggcctgaagagagcagaagactgaccctcctgtgagtaaaagtcctcctgcctagctgccttcaaactggtacatcagccttttttccctgccttcagactggaactgaaacatcagcttttcctgggtctccagcttacagaccccctctgcagatcttgggacctgcccacctttctaattgcgtgaatcaattccttataatgaatctcttcatgtgctcacacatacagacacacacacacacacacacacactcattaagtgcttgttaatgtctttttaaaagtgggttgtgatgaatatctgtggtatttagaatccattagccacattaaaaagtgatgtaaatttattttatagttttaatatttataatatgccagaaattatatcttttacaactatttatccttatcattaaaaattttagatgttacctaaatgcaaatatgtagagattgcattgagtctgtagactcaaaatcccagtgacattttttgcaaaaacaggaaaacctattctaagcttcatatggaagcccagtggatccccaaatagccagaacaatctgtttggaggactcaacatttcctgatttcagaacttactacagagctacagtagtcaaaacagtgtgtgttaccataaagacagatacgtagacccaatggaatagaatagagagcccagaagtaaaccctggaatatgtaattaaatgattttcaacaagagtgccgagagcattcaattaaaaaaaaaaaaaaaaaagtcctttcaacgaatgaggctaggaaaactggatatccagatgcaaaataatgaagttggacccttacttaacaccatatgaaaaagataattcaggacagatgcagtggctcacacctgtaattccagcactttgggaggccagggcaggtggatcacttgagccaaggaatttgcgaccagtctgggcaacgtggtgaaatcccatctctaccaaataaaaatacaaaaattagccagttgtagtggcgcattcctgtagtcccagctactcatggggatgaggcgggtgctgaggtgggaggatcacctgagtcctggggaggctgaggctgcagtaggccgtgattataccactgcattccagcctgggcggcagagtgagaccttgtttcaaaaaaaaaaaaattaactccaaatgaatcaaagacctaaacgtaagacctaaaacaataaaactcttagaagaagacataaggggacagtttcatgacattgaatttggcagtgtttacttgaacaccaaaaatataggcaacaacaccaaaaaatagacaaattggacttcatcaaaattcaacatttttgcccttcaaaagattctatcaacagagtgaaaaggcagcctatggaatgggagaaaatatttgcaaatcatatatccgataagagattaatatccaaaatatctgaagagctcctaaacacaacagcaaaaaaccaattcaaaaatgggcgaaagacttgagtagacatttctccaaagaagatatgcaaatatccaataagcaatgaaaaggtgctcagcatcactgatgattaaggaaatgtaattcaaagctacactgagataccacttcatacccattaggatgtctattatcaatagaaaacaaaaaagagttacagagtatgtagataagttgaaactcttgtgtattgctgctgggaaagtaaaatggtttagccacttgaaagatagtattgctgtacctccacgatattaaacatagaattactatatgatccagcaattctacttctgggtatatatcccagagaattgaaagcaaggactgaacccatgtttttataccactgtttatagcagcattattcacagtagccaaaaagtggaaacaacccaaatatccatgtatgggtgaatgaataaacaaagtatgctatatacatacaatggcatattatttagccttaaaaagaatgaagtcctaatacatgctacaacatggatgaataaaactttatgttaagaaatataagctacacagacaaggacaaatattgcatgatttcatagaggcaaaacagggactgtggggagaggagagttgcttaatactcattaatatagagtttaatggtttaattaataccattaatacagaatttcagtttggagtgatgaaaaagtcctggagatggatgatggtgatgggtacacatcaaggtaaatgtttttaataccactgaactgcacacttgaaaacagttaaaatggtgaattttatgttctgtatattttaccataccaaaaaggacataaaacatattgagatagtttttgagatttgtagatacatggatctttagatttctcttagggaatgtgtgcacagctgctcatgtatttggagaattcatgtctagtgtccttcacggtctgaatccagccctcttctctcacttcattttccttgttccagccacctggcagctcacacctgctaggcttttgtacaagttgttctctctactttcagtgccccttctccccgcacccagttgctgaatggaatctgatacttcaagacccagcccaagtggccaccacatttggaaaagttgtgctcactcctccagacgtaacctgtttcttcctctcctgtgttcccaaagaacttttctgcacttcagatacgtcccatgcctgtccccaaacagagtgaattgttggacagagatggtgtctcacctttgcaactcctacccatagcacagagcaaaacttgaagcagggccttagtaaacagttcagtaactgaatttttaaaatatatatatgtgattctttccttataaccctccgctgggagagtagacagacctttcgctctactttccaaaaccagaaaatgagacacaaagcaagttcacaccttgcccaggccacaggctcactgtggctgatgggaatagagggatagcatcagaattctcttctgatgatcctagtctgtgcagccaggcactaaatcttactgtcaataagttaagggtgtgactttattggttataaaacacatgttctcaaatatttgccatagatcctgtccataaatgaagtgatcttatacatatttctgctaccccttccataatagaccccctgccactgttccaacaccaggaggttggaaacagctgtgtcattaatgaacgacagcagatcctaaccagtgacctccagatgaaaggctcattatttccttactggtctcaagagctattcagtcccctagcaagccagctcagaatttggactgaagagtctaagccttgaactataaaaaaaatttacgaagtccttgacacaatttggagcgattatgttctattgtgccaagaatttcttattaaaaatcaatttaattgtgcataccccatctggtcggtattatggtcttttatggggggggggggaaacacgattttgtgtttacctgatgttccatagagtaagcatgtagttttgcagaaacagagacattttataacgctgagaaatgagtaattaaagaaaatttttaaatgtttaccagacttctttttactaacttttgtgactttgagctataagattcaactttcttgcgttagttgggattttaacggaaaagaaaatgccagactaaagtaaaaaatgtatgtgtgtacctcatctgctacatttatttccatgtaataatttctattttatactctcaagattaaaattccagtccttttattcttttttctttttctttttttttgttttgttttttgtttttgagatatgatgtcatggagtctgtgcacgatcatggctcactgcagcctcaacctctctggctcaagcaaccttcccacctcaggctcctaggtaactgggactacaggcatgtgccaccatgtccagctaatttttgaaaaaatttttgtagagacagggtctcactctgttgcccaggctgatctcaaactcctgggctcaagcagtcctgctgcctcaacctcccaaagtgctgggattataggtaggagccactgtacccagcctcaagtccttttaaacataacctagatttcccattagtatttaatttgtgttattttttattcaaggaatttggataatgaaagatgagaagattacttctgattgtctgctaggccagtctcaaccatattagcaaaagattgcaatattttcactcaaaatattgccagatatattttaaactggagtggttgcattttgttgtacaaaatggggaagatttttaaagcttgcttttcaaacagcttataccctaatcttaaaaggatcccttggcactcaaggaaaaagatctggataattcataaattttttggtgtgcttatgtgcttatagttgttaagtattttgttcaagtgaccatcttaaagtatcagtaatataataagttagtagccataaatactgatttgattctgaattgccttaacttaaatgttttaaaaattacttttaaataagtaggattgactgctagtcgctgcagtctactaaacacctatttgatatgagccataatatctttcatcttctctgtgccccgatttcctcatttgtgaaatggaataacaccttttgttaggattgttaagatatttaaattagataattcatctagagtattgcaaggttcttggaactgagtaagccataaatacactttagcctgtatcatcatcaaaaataacagaaatgactgttctgcagtgtgtggttttcttatttaacatgctcttttagtgagcttttctctttaacatcaagtattaatattctgcatatatccatttattgagcacctactgtgtgcccacctgtgtgctagatcctaggtgtacgatattgagtggaatcaatataatctctgagcacatggggtagccagataacaatacaataaaaattacagaatgtggcaagctcgaagagaaaaatgagtgcggtgtggtgataaagacaagcaagttctcttcttctacataattctttgaagttgaagtgatgcttatttgttacactgataataaaaatgtataaggaaaaaataacttgccctcttctggctccatgtctgctcaggaatcaatagaaacagtttggccaaccattcatacttttctttgcactcatacaaatgtatgtaaacatacagcatttttgttgtggtttttacaaaaaaaaaatggattctgtgcattgctctgtaactttgttggtttgccttgaaaagtccttagaagtgttattagtatgtgatgtttgctgctggcattttacctacccaagactcagtcagcaatagaaaactctccaaagattttatagatgaggccctgtcattatcacggtatcctctctggtctccatttaattctggccactccatcccataatttattgaacagaaaaagattctctagggtgtcttactactactactgttattattattcctgacaacctttgctctataatagcatttctgatctttttcccttgatttcctgcctacttacctatttatttattttgccttttcctttgtcaatctcatgctgtttcttgggcattgtttcatttccatatttataaatttaacattttaaaagataggtgtttctagttcatagatttgctgcaatcaccccctactaaagaacttcagggttttttgtttttttttttgtctgtgctttctattttgttttctgctaccaacaatactgcaaaacaagatgggtttttatataccgctgctttcatttatgagaagtggatttccagaaatagaatttctagacaaagtatatgtttatattttatcttactacatatggccagatcaaatttcaaaaaaaacctgaagcattttgacatttaaacagatatctttggtgccagtttatcagcccagacctgatatgcaaattagtagatcgtgatgttattgccacttcagtaagaaaccatatgttaatttacctcattattctccatagggtactttttcacttcagtcctctaccagggatcctgaaagagcagagtaaatagaagaacaggtcatcccttttccacattaagtagtcgtttgttaagtgtcggctgttagctgagagcctgagagtggcggcaggtacaacccgccgaggttggacgatggcagcgggacgtccagacaggagcctgtgcaattagccaagacggttactgtgtttttggcagtcaggcagcagttaaagcaaagaagggtcttttttttccaagaaggaaaagccatttaataagtttgggtcagtttgctcataacaacactacatttgaggaccaaaaaccccaggagcttggcaagccagcagtgcttggcaagtcttcctaccagctcaccaagtctgaggccatcctgcagggatctggctctctgggctttgactgtattcatttaacagcattcctagttaacaagaaactaaaggcagaggaatccttttcccattagtccaagagtaaaatttagtggctataagcaagccaccatccaagtaactgcacgtcaaatgggggacggacagtctgtttgtattgaaggctctgcgtttagtgtacacagctgggaacttgtggcccaccaaaaatgacatttatatttaggaattgggtggtgctgtctttttggtgtatgaattaacatttgtatatgacttactagtgtgaaagtctgattttataatgtgtcagagagccatcgtttacctgtctcatgaataaataaaataaaagctaagtacgtttgtataaatatttaaaaatacactgccttctcatacttttcccatttcacctatggaaaccttgccaaaatgaaatcaaatttgagcgtttcaatgtaagggaaaaccagctcatggattttaaaattaagaagtggatttttttgtttgttttgtttatgttggctttgggtttgtttttttttttctctaccaagtaaatagtttcgatgaaataaacaggtccaatcatctaatgatggattatttgaatgcagattgaaattgaattgaaaatgttgagaatgagcttgtttatgcttctcaaaaagctgcagcacctgcaactgataaaaattagtgcaaacatatcaaaagtctttgaagaaacatgtggccaatccagtgccaacttggacagaatcagaacactggctgcttagaggaaatatcccaacattcagctaatcaacaatgttaaatgaaatgaagaatgaaactttttacatgactcagtattgcttggaacaatgttaatgtcaacaaggtcagttcatggaaggagatgctagatttcttaagatttttaccccctcgtatgttttcaacagcttgcgtgtcttgattataccgaattcactcagtctttgaaataatttctcattaataatttacaaagttatgtgtttgttttcaggatccaaatttgtgaaggtagcagattcatatccagttataggaatctgttattcctttttatttgaaaaagagtaaagctttctaaacccaagctcccatacatataagcagaatcatggcttcatgcaaccagccacatgttattattttgtttgtaacaaacatctgttagaaacaagatttctaagttttgtatcgggttgaccaaataaacttatttctttagtctagggtttctcaacagtggcattattgacattttggactatatgattttttgctgtagagagctcttctgggccttgtaggatgtttagcagcagcatctttggcccactcaatgccagtaggctcctcccccaaggtgtgacagtaaaaaacatttccagatcctgtcaaatgtctcctcagaggcaaaatcacccctagctgagaattactgctagaaacagctatataaataaaacatgaatgtgttaaacaagtctccctctttcccccagagaacacttctaccacctaaagatgatgaatattaatgatcccttatgtttcccagaaagttgccatgcatatatgagtatgtacatctgttctgcacagtcatggccattcaatactacccttattttttcatttttaatgtatctgtgagattcttatcttgcagtgcatggggacttatatttaaaattaaatctttttaaacttacttagagttcattacaggatgagccgtaatttctttaaccagctttcaatatacatgcaggctctagttctttgttttccatatataagggtgtggcattgttttccaaataatgccataccattatatttttgtgttgaatattatgtgattagagctataaggtataatttagagtatgtccctacaggtggaatcacttgttcaaacgaaaactaaattaaacatatttatagacaatgctatctcaccagctgggtattacagtgttgtttccccagtttaccaaacttttatatttttacccatctgataagaaaaacagttatatccatttgtgtacatgtttaataaaaatgagatttcctgtgtttctaagccttttcttccccctgtgatcacactccatatactctttgcccatttttctagcagcttgtagggttctttctgtctgatttgtaagaactttttatatattgaagaaattgggcctttgttttcatagatattccaaatatgtgtgtactattcatttaatatcagttttctttcaactttgttaatatttgtatttatagaaattagtttcaaatttgtccctcatttctaagtttaatgtcttacaggagtcatgtttcacatagagcaaaataatggttttcatgttttcttccaatgctttcagagttttgttttttgtgcttaaatattcaaggcatctgaaattcatttgagtatatagagactgaaatactacatattcttttccaaatactatggtaatttatcatgtgataagggacatttcaaacaagtgggataaagatgacttattaaacaaatgctgttgacataattgctgatatttaggtgcaaaataataaagctgggtccgtacttggtgcctgcaaggaaccaacagaaggccactgtagctgactggaggagatgcagtgttgtcagaaagataggtgggggcctgattgtgttgggctttgtaaatccaagctaagaatttgatcttttttgaatagagtgtctttttcatgttcatttggcatgtttctcttatatgtagcatatattttggattttatttttttatccatctgaacttttattgtatgttgggctttgtaaatccaagctaagaaactgatcttctttgaatagtgtctttttcatgttcatttgacatgtttatcttatatgtagcatatattttggattttatctttttacccacctgagcttttattttttattattaatataagacacgtgtttaatattacttctgtcatcacattttatgttacttttcagcttttgatgtttccttggtttctatcttttactaaaattcctatcacactttatttccctaaggacttgtaaacatcttttactctcttttggtattgtgtactgctagagagaagtaggaagacttcttgatttttttctctttgttactttttctgtctgaatatactgaagaattgatcctataaaatcttaaaactcattaatttctatagcaggacatgtgtgggtattgatctttctgtgtctgttgcttgttttgtttcctaggatgaaggatcccctctctactggctgattagggtatttcagaaaattttcttctgttatatctttgaacatttttttaacttctattttcctctttttttaaaatacatctttttgggaattttttgcttatctttaaagtcttctgacctttgctgagaattgtgttctcaagctttactacctatctctacgtgtggtttcagcagtgtcagttcttttttttgaggcagagtcttgctctgtcacccaggctggggtgcagtggtgcaatcttggctctatgcaacctccacctcccaggttcaagtgattctcctgcctcagccttttgaggagctgggattacaggtgtgcaccaccacgcctggctaatgtttgtatttttagtagacatgggttttcaccatgttggaccaggctggtctcaaactcctgaccttaggtgatccaccctccttggcctcccaaagtgctgggattacagacatgagtcactgaaccctgctagcagtgtcaattctggctttcatttctctttagggtagcttcagtttgtaacaatgacctcttcctatttgtctctttctttgctatattagacatcttattgtaactttcgttgcaaagaaaattcactttttcattagctctcttagtctcaccaagaatgtttgagattttcttcggccgtgtggcttgttctcctggaaagattatttcatgtgcgtttgtcatatcctcttatttttttctataatatttttggaagatgtctaggggaaaggggattccaagttgtcttggagcacttcctgctctggtctcctatcactttgcaatcataagcacctcccttgctgttgtttctttcccttaggagaggaggcctgtatgccctagaggaaatttctgtgtgttataggtttctcttggatgattctgcattttttttcttttcagttcaccttgaaacttacttgatcagtgtctgccaagttgattgtcatttatattttctatactgccctgctgtcttccctgattgattcctgaaaaaaaggagggaaaaagcatattgcccttcagctttaatttgcctgctgtgttgaatccatccaggattcaacctctgcctctgcttgccctgacctctatattttatctattttatcctctaaattagagttggtttggctatttcttgcgttgtttcacctatttctttgaaaactttttttacttggtttaatctgtagattcggtctgctgtgggcattctctcttgatttggtctaatctgatcatatttgtttgcatctattgtatatcatttgtagttttaattaaagctactcatagtttcattgtgtatgtgtttgctttttttttttttttttttttttttttttgagacagggtctcactccatagcccaggttggagtgcaatggcatggtcagagctcactgctgctgcccaccttttaggctcaaggaatcctcctgccttagcctcccgagtagctgggactacagaggtgtgcatcaccacacccagctaactttttattttttgtagagatggggtctcactatgttgcccaggctggtcatgaactcctgggctcaagcagttctctccccctggcctcccaaagtgctgggattacaggcataagtcactatgcccaggctcttttctatttttatttgttttttctatttttagttgataacaagacaacatgttaactggattttgcaataaaataaaatacccactagatatctttttggtcaattgtttgaataggagaactcagaattatggcacagtcttgggaaaattaacttaaaacccttgaaacagtttactaatgtgtttgaatctgatgtggatccaggctctcattgcactaaaagtgtggttgaagtattgactgccaagacctccagtggtagggagagagtggggttgaaattgtggttttagggatggctattatttgaataaatgttgtaggaattttccaagcacagaacacagcatgaatctctggttcttagttcttcaccaatatttcttcaccgagaatagccagacctcttggaagggtagttgaaattgagtgactaggagagagagcatcagatcctacaaagaatggtgatgacagaggatggagggaattggggtgatggtcaaagggtacaaagtctcggacaggaggaataagttgtttggggttttttgagatccattgtgcagtgtggtgaatataattaatagtgcattgtacatttcaaagttgctaagagtaaatttcaaatattctcacaccctcaaaataagtatttgaggtgatagatatgttagttagaatgacttaattattctacactgaacttggaaactttaatatcactttgtaccccataaatacatacagttataaagggtcaatttacaataaaataaaaagttttaaaggaaaaagaaattaagagtgaatagaagtgtggaaggatttttgaaagtcagcaagtttatcttggatttaggagggagccctagtagttttttgaacagggtaatgacaaggtgaaagctgtatttaaggaaaacttcatctagcacttgatttggcatttaatttgatctcacggggacttggtgagtacctgtttgtaccaagtatcatactggatacagtagtgcacagagcagcatggggaagaattcctgcttcaagaaacgcagtctggtggagtcaagaaactgattttgaaaaatctgcctcagtaaaatttcagtaccagagttgacctcaactctggttgtcatggtgtctgttctatgttgccagttaggttctaccacagcagcggtctctgtctgtgatgatgtgacacagataacgttgattctatgatttgtatgggacactctaaagtctgccctcaatcagactctcatatctcatataaatgtagctgaatattcagcagcaactttttgaattccatattttcatgtttgcttccttctaagtcaggtttctgtcctcccggtggctcggccctcttctaccccagtcctgctgcctccgtgtattcagattacatctggatgatcacatctcatataaatgtagctgaatattcagcagcaactttttgaattccatattttcatgtttgcttccttctaagtcaggtttctgtcctcccggtggctcggccctcttctaccccagtcctgctgcctccgtgtattcagattacatctggatgatctttccttttctgacagtgttttttgttttttttgtttgtttgtttgttttggtttttattttcttgagatgaaatcttgctcttgtcgcccaggctggagtgcagtggcactatcttggctcactgcaacctccacctcccaggttcaagcgattctcctgcctcagacccccccgagtagctgggattacaggtgcgtgccaccacaccccgctaatttttgtattttcagtagagatggggtttcaccacgttggccaggctggtctcaaactcctgtcctcaggtgatccgccaacctcggcttcccagagtgctgggattacaggcatgagccaccacgcccggtctctgacagtgttttatcccttgtcatgtacactaattatatcctggcacttggctctgtagttgtttttatatcagtcttgcctaatcggttagaatcatagactacttgaaggcatgaataacagcccacattttatctatttatttatacatctctcattacttcaaaaaatgatttgaacatgtttcttttatatgattgtgttttgaccttggtcaaggtggtagacatctgattaaggagggtcaataatttatgaactcagaacacacagaacagaggactttttgttgttgtttttaatttatgatttatatctctttgaaagtccggcaaagacacatcgtatttctcaaatcaactttagagaaaaacaagagtgtgaagctgagactcctccagtcaatgagaaagttttgataccaaacctattaaatgcaaattaaatctatttttctatgaacatgtgcatattatctctgaaagtagatgtatgccttaaatataaattttccttacaatatggatttctgtgatatcgggaatctatgttttataaaggaacaactgctgcagtccctgtggctcatgattccttagcagctgtgtccagctggtggtccacattcccgctacttcttcagtgaatggaaacatttaggtcaatattgatataaaacttcatgagctttcttctctttcagctttggttcgcctttgttaatggattttctgggcagattttatttgaacgttggtgcatcggcctgtacaatgtggtaagcattcttcatctctatctgatagcatgcagaacttagaacttcagtgacattccttcactgtttatgtctgggaagtgtatctgagtcaatcatctgtatacttagcaggcagcacaaatacatctttgggccctttgttgctgtgaaacatcctgcagaagcccaaactctccacacatggtttcaatcatagcagatcattcctgaataaccccttgaaattattaacccatatatcttgataatagacccttgttacccccttactacatgcctgtgcaacactttcgtgtttttagctcaagtacaaatttctgaactacacctaaactcattccgcttcattatttttgttctgaattcttaaacatagatacaaatgtacagtgtgtgatctggtgtccgttctgtccttcctgaaagggtatctgtccttgtggaagaacattttcttctgcagttagagctaaaataatgaattctgacttccagctactgtggaggatggtaatcagctcatctggtattttttatgattttcaagttccttttttattactttttataactatgatgaattcagaagctagaaataaatataaactgtagctaaaatggctcagtagctgcttagctttcttgctttttgtttcactggcaggaagaactaaggggcatgtagagcactctagagaccctagaatggcccattttttgagttgttctctcacttgccttcaatcctaactctgctccgtgggaatttacattctgaagcagccatcataaataaatgtagatggaagttaccagacatacaataataaaacctatggtgctataaatccactggtggctagatatttaagtcttccatgctttcacccccctttattgaataacctcagtgctgggtgctgatgtaaaatgctgaatgcagtagtttgccctggccctgtgtagcttgcaggttaagagggtcaaatgtgtggattcagacacctccaaggaggactgggtccagatcttgagttgaaattgtgttggtgagtcagtaactgtgttaacttgctgcaaagtcactagcacatttcctcctgatactgatgccctaaaagacaaagattaggagtggtaagaacaggacagaattgatgtccattccctcctgtgctaaaaaagctactctgactacctacccatggatgggggctccagggcctcccctttgtgtactaaggggagatcacagattgctaactctgtacctcctgaaactattttaagtaggttaaagctatgcaaccatttcggggaaatatgcagaatgctccacgattattcagtgcttgaaagggtcaggtatcaatggagctgacacttcacacaaacacatgccacatccctattttagaaacaaaatgctgagacctaggagagattttgttgtagagccaaggacaggtgtggtatatatatatatatatatatatatatatatatatatatatatatatatatatcacctgcttatagtatgagtggattttagcttgatttctatgctcagggcatgagggctggattcttttcttagctccatgcagtcttggccaattcaaattaatccaacagattttattgagtgcctactacagataagatgctgacaggctagagggcagtgttggtcaaaataaggcccacagaccatttgcaggagaataactagggtttatttgaaaaatgcagattcctgagccccaccccagattaacaaagagaatctcagacatattgcagtttttgcaattttttttttttttttgagactgggtcttgttctgtcacccaggctggagtgcagtggtgccatcactactcactgtatccttgacctccctggctcaagcaatcctcccacctcagcctccttagtagctgggaccatgggcaaatgccaccacagccagctaattaaaaaacattttttttgtggaaatggggtctcgccatgttgcccagattggtctcaaactcctgggctcaagcagtcctccctcctaggcctcccaaagtggtaggattatagtcatgagccgcaaacttttctagttattgttatgcatgaccctagggttgagattatattttatgcagtttttctgtcccctaaactatacagagagtacactgtgatagaaaagtgtatttcaaggtgaaagggtctaggttaccactgagtccacagtgcaggcattgaagtgggctgccagtgagtgctggcagttgggatggaatggtcaaggatctgccaggtgaactccaatgtgccactgggctctggacttgctcatactggaggggccaaaccttctgggaacatggagatttgcccccatgaaaattgttttggtgacatttgtataaaataaatagaaatatagagaaaagttacaaaaaaggtacaaagaactactatttacccttcacccagattgaacagtaattagcatttccaccaattgcattctctttctccatacttgtacgcatgcacacatgcctacactcatgcacacactagtgaatgcatttatttctgacccagtggggtattacaaacatcatgtcgctttcctgcttaacactttagtcaatagtagcaagagcttcctcttatacaaccgaagtataatgatcaaatctgaaacatttaacatggatttaatactattatctaattcatcttaatccatattccagttttgctattcttgctccaataatgccctatttagcaacttttccagtccaggatcattctagagactgcctgcaagagaacatttgtgatgtggaaggcatttgctagtgatcctcctcttctgggctgggttctccgctgtcattttcttcatgcagtatttctctcctgctttttcttctaaatgtactctttgtttgattccgcaagtcagctaaagtagcaagtcgttgttcctcaaactaattttcttttttttttttttttgagatggagtctagctctgttgcccgggctggagtgcagtggtgcaatctcagctcactgcaagttccacctcccgggttcacgccattctcctgcctcagcctcccaagtagctgggattacagtcgcccgccaccgcgcccggctaatttttgtatttttagtagagatgaggtttcactgtgttagccaggatggtctcaatctcctgaactcgtgttccacccgccttggcctcccaaagttctgggattacaggcatgagccaccacactcagcctctcaaactaattttcataacaagttaatagcattaaaacagacttgaggccgggcgtgttggctcacacctataatcccggcactttgggaggctgaagcaggtggatcacctgaggtcaagagttcgagaccagcctggccaacatggtgaaacctcatccctactaaaagtacaaacattagctgggcgtgacggtgtgcacctgtaatcccagctacttgggaggctgagacaggagaattgcttgaacccgggaggcggaggttgcagtaagctgagatcacaccactgcactctagcctgggcaacagagcaagactctgtctcaaaaacaacaataacaacaagaaacaggcttcttcctaagtaatgaatgaatgctgtcccagaagattttcattatatccatagtcaatttctttatttttttttattttttttgagacagagtttcactcctgttgcccaggctggagtgcaatggcgcaatcttggctcactgcaacctctgcctcccgggttcaagcaattctcctgcctcagcctcccgagtagccaggattacaggtgcgcaccaccacgcctggcaaattttctgtatttttaatagagacggggtttcaccatggccaggctggtcttgaactcctgacctcaggtgatctgcctgcctcggccccccagagtgctggaattacaggcgtgagccactgtgcctggctcattttgttttgtgggtagaatgagactaaaaataccacgaaggaccaatgctgctaggatcaaatggatttcagctaaattttatgtcttttataatgcagagaacactctagtattatttgaccacttgcagaaaatgaatcctgttgtcaagccagcatcgtttgaggaagaaaactgtaggccagtctcacttataaacataaatacaaaaattctacgtaaaatattggcaaatggagtccaataatatattaaaagaaaaagtatgtgacaaagtaagatttattttggggatacaggagtcttgaaattaaatatctttctaaatatcactatatcaagaaaataagaaaaacatgatcccatcagcagatgctacaaaaacgtttgaagcaattcagctgccattcccaaaataagaactctaaataaaatagaaacagaaaaaagccatttaaccagaattcagaccatttacaaaaaccagtagcatgctgcccaaaatggtaaaattctgaaacggtttcatttaaaataagaaattaatcaagatgcctgccatcactatataattcattgttttcatgttttcggcaactgcaaagaagattacaaatattgggaaaacagtgaacaatttctgtacgtatacacatatgctcacagaaatatggtaatgtaaatatgttcatatatgattgtgtatctagaaaacaaaagaaaaaacagtagataaatactcgaattataagagaatttgataaagtgaccagataaatgataaatatatttttaaaatcaatagcctttttctagcctagcaataaacagcttttttttttctctagcagtggacacctagaaatgcaaaggaagtacgaattctttcaaaaaagcaattaaaattatacattgcataggaaaaatgtttacagtacctacatttttaaaagtcttattgaacaaatggaaaagcatactattttcttgtatgggaagacttagtatcataaaagattcaactcttctaaaattaatataaatatatatgattccacatagactcaatcccaacaggtgaatgttttgggaggaaagggggaagttgcataaagttatattaaaatataaatggaatttacacatatctgagaataaatatgtaaagcatgctcaaaaaaagaacataaaagtagacttatttttactaaatatcagactatactatgaagccaccataaccaaatcactgttattgacaaataagttggagattctagaactacattcccattctagagtcagatgtgtaatacatgaaaatttgattagccttaaaggtgatctttcaatgtagtggggaaagtttggcctcattaattatgttatcacaattggctctttatctggaataaaatggactcctatatagaaaaattaattccagatatattaaagacttaaatgtggaaaataaaatagtaaaatcctacaagacactcctggaaacatgtacttttcatggaagagtaacttctgtagccgcaattggacatgcagaagcatttcttggccatttaaatattaaaagcttttatatggcaaaagaacccatttaaaaaaccaatagacaaagagtgcatttgcatgaaatttcataatataaagacagggttgatatctgttctactcaaagaactctttaaaaagaggataagccatggatagaaagtagacaaaagacatgagtagacatttcacagaactgcaaatgcagatagccagcaaatgtatgaaaacctgctcaaactcactgatagttggggaattgcagctttttaaagtaagaagtagacaaaagacatgagtagacatttcacagaactgcaaatccagataaccaacaattgtatgaaaacatgctcaaactcactggtagttggggaaatgcagctttttaaagtaagaagtaacatctttaatttttaagactggagaacattaaaagaccaatgtaacaaccattgctgatagggaaatagcgaaaaatctatgattttcttttgcaatgggagaggaaaatgctttcaaaatcctttgaaaggcagaatctagtaaaattaaaaatgcatgtatccttttaactctcctgctgggccttcttcccatagagataaaagaaaaagtctgtatgttataatatagtatagatatgtattacataatgtttgtggtaacaaagaactggaaagaaaatgaatgtctgtcagtgggtgaatggctaaaaaaaatggcacatccatactatgaattattatgtgaccattaaaagactgcattaccatcaaacccaagggctttggggggctttctgtaatgtattgtttagcaagaaaagcatgatgaagaaaaatgtgtgtaaagtataatgtctacctttttggttggcaggagacagggtctcactctgtggcccaggctggaatgcagtggtgcaatcatagctcactgcagcctcaacctcctgggctggagcagccctttcacctcagcttcccaagtagctgggactacaggcacacactctcttggtgtgttctgtgaaattgagacagggtcttggtgtgttgcacaagctggtctcgaactcctgtcttggcctcccaaagtgctaggattgcaggcaggagctacatgactggccagtgtcaacgttttatgaaacaaattatgatccctaacgtgtgtgtgtgtgtgtgtgtagtatggtataggcagagtggaaaatatgtaggcatgctgggcttcattatagcatggtgatgaagggcaggggagaatctgaagatgggtagaaggagaagctcaagtttaaaaaaagaaaaagactgccacgtaaacagcaggcatgacatcacatgtacacatggatgcagagcaatggaggtgagagtatgtactaagaaagtgtgcatggctcctggcttctggtagaagctctgtccagctataaaacaaacaatttttgttgttgtgaggaaagtgagtgcaacaagtcccctgtggatttctccttgaagtctttgtagcacattgaaatcccagggctgctttccattctgctgtggactgaaggaagagtgtgagagttttactgactctactcaccacacatctgattgcctgctcccaatagacttgggaacagcttcctctggccatatactccatctccaaatagctagtgtgagttcagaattctcgtacagacacacgtccaattcccacaggcctgagagcttgctgggtttgtgggtggggatttgagggacgctcagcagcaagtgacccaggctgtgtgaaccattcccagaaccaagcaggagaaggaccctcagggccaacatgtcctgagttaaaatgacatgtttcttccaagcaccttcttcagctcctgcttgatttttctaatatacaaatgtgagtacaggtgaaagtcacaagtcttgcaaggcaccatctgcccaagaactcattgtcactggagattgtttggtctggtctccttcctatccttgccttacaccgcaccctcagccagccaccatcctgtgtatcttagaaagttcctcgtcctttaaatgacaacaatttaaagatcgaattggcttttattagccattctggaattgggtaacatctcatttcatgaaacagaatgagtgctccgatgagctgagcagaggaggccagctttataggcagaaagggactaaggaaacagaagtagaacaaaaagtgattggttgtttcaaagtggctttctttacagagttcaaacaggggacttctgtatcatgctgcctcaggtaaactgggccctttctggtgcctaggtaaactggttgctgtgaatctcctgttttttgtttgtttgtttgtttgtttgtttgtttgtttgtttttggaaaactggcctgtttcaaagtttagtttgatgacacagctcttagcacaagtaactccattttggtttggtcaggtctgctggggccgagtgcaggagctcagtccaaacagtggcctcctataaacgttgttcaacacctccaaacaggcatgctgatgtctcagagctttgtaaggggtgcatctctcatgggactccttcctcgcccacatccctgtcatcttgccaaatcatgttggtctaataccttgcaggtcagatactctttggtgcaagaatcctttggtgactctcccttctccttctgcgtcctcccctaacaggtattaatagttttgcagagctccgcgttttgtatatttacctctatgcctgttgccccactgccctcctccacttctgcagtagatggcgttcctggaggtcctaattcctttccttctttcttctgtttgtaaatctctccattcctggtgcttatcacagtatctagcccataatttgtttattgtaaatgtctgttgaatgaataaatggatgaagtacattatgcttcctgaaatttgagtataacgtcagggtggaaagttgtaaattttacgtcagctagcgtgagcagaaaacaaagcaacacttcagacagctaactgtggcatgattccacatcagtcttcgttttacaaaggaaggtagttgctaatttaacaagaaatcttggctaatcagataatgtatgatgtttttagtgttcagtgtattcatttgatagtgattaacgtaaaaatggtctttcatttatttcctttgtttggagggtgtctggggatctgtgaatcatggagtctcaggtttggacttgactggaagtgaagtcatcatttggtagaagggaacaatgaagccgtgtggatccgaagggctgcttttaatggctcattgttctccctgcagattttcaccgctttgccgcccttcactctgggaatctttgagaggtcttgcactcaggagagcatgctcaggtttccccagctctacaaaatcacccagaatggcgaaggcttcaacacaaaggtaaacagagtgtgatctcagaactgtcacctcagaaaggcgtggctgtttgattctagtcatctgcctaggagatagttgaagcttgagaaagaacatttgagaagtgctgaaaacatgatccactcaccccaccaccacacacacacacacacacacacacacacacacacacacacacacacgccacaaacccagtgaattcaagacgccttctcaggtgacgggtccatgctgtgtgggctgcaacctccagtcccagcatgctgactccttcccgcttctccccgtcagcccctgacatcagtgtgggcagcagttcccacagcccaggttcaggatccgctgtcagagatcccccttgcgtggtcctgcagccccatgtggaggcctgttggcagcttacctagctgttgctgggtttgtcatttgaaataaaatgtgtctttagctagtgcgtaaaattgactagatatgaactcagggatcacatgagttgcaggggatttggttttgtttttctggaccagagaatcagaaaggaaccaaaaaaaaataaaaaaaagaaagatataggtgatcctgacaaacccgcgccaaagctgggtggggtgttaaaggggtcgtgcagtctcagacagcagaggggtctgccacacagatgtcatttgcggctgaatgtggcagagtgcttgggtgaccccatccaaagaaaagggagatgtgtgcctgggcacagaggggcgagatgtgagcatggctgcacggccttgtttctgcctctggtctttgcgcaggggggattcagaagtttagacagaggtctgttgcacagttcacctcctgtgctgtgtgctggtggcggtcatgatttgcgtgcatggttcctgggccgtcagtgagaaggacacagggagtcacctctccaggcctcaaggagagaacagtctcccagggcctttcttctgagccagatgttcctgacgtcccttacagctgcttttttctggggaggctcactagttacatccgaggcagggaagaaacagaagggctccttattggttctaccgtctcccacatccaaagagacccgagggactcattttaccaatccttgttgactgtgattccgttaatgggaaaatatgacccattttcactgcattatttacataaatccattttctacagaatttgaattcaaaggccatttgaggtgggaagtaagtaagagctgagaatgcacggaaacttatctgcaggcactttgaagaattttttttttttttttaagtagagaggtcagagatggtgcaaaatgaacatttaaagcaggggaaaattccattgtcttataacatttttcactattttctgttgtcttaccactacttaggctcaaactatatgataatttccagggacaacttgtagaggtttaaataaatttaatctggctttaatagttaataactcgaggggggcagccaagatggccgaataggaatagctctggtctacagctcccagcgtgagcaacgcagaagacaggtgatttctaatagttaataactctgtcatcacggtggttaaaacaatgattgcgatgtattagtgaaactaaagtttagaataaactaaaccttgtgttcttttttctgacctttaaacattaaaataaagagaattttcaaatatgcatgttatctaaaatcccaaaaataaaagaagaagttgagtgagagggatttgaagtagtaaaacaaaagagtgagaatgccatgtaaaaagttacaagtggaatgttttcagtgcttttaagacatcccatctgccccgacacagtttaattgttaagaagagacacagttttagtctcttcttaacaattttgacctagtaccctttttctggatgtttgtaaaatggtgttgtctctcttacaatgctaaagaaaactgatcagagtgaatttttcacatgtggatagattgtgttggtctgcatacatgtgagtagatatttaggtctttgtaactaaagtaatatgatctggagataatccagtcatttgtatgtaaaaattaaataatcgatttgggtgggttttttttttttcaaattcaagaataatatgctactcctggaaccgtgcagcgcacggccaggatccttcacaatgtggcgtttgttgagagtttcacagaggtcaagcgttttgggcagctcctgactcccttggtttgtttttccttaggttttctggggtcactgcatcaacgccttggtccactccctcatcctcttctggtttcccatgaaagctctggagcatggtaagggctgtgtgatttcacctgtcagcaaggagctttgcagccgctctgctgcctgtgtgttcacaatttttttttccagttctgcagaacaagagatcacaggaacacattttagaggaaaaacatacctaaagcataatgagagctagtcccaggtttatagctgttaggtttcatcagttctggccttgagaacccattttctttccagttgactggatagtttgagtactaggaatactcaactcagttttaaaaactatttgagtcagagatcttcaaggaaagccctgtactgtaatgaaatgttgatgctttttgtccgtggtttgaaattctcttttaattactttgacttttatttctgagcctcccctacccatatgcagaataactcaaatcttataagatttgaatcttattcctagctttctgaaagagtgtcctgtccttgatgtacgccttttgaaattagagtttgagaactaattctccagattggtgtttgtctttacagctagaagaggatgtctgagaactgtggcagactcggcgttttttcacacttcttaacacatccagaacgtggcctcctaaagagacatatttttattctcagaaaatacaaatgtatcatgagaatgctactctttcatccctctcaaatagtaataatccccctgggaaaaattactccaaatgttgactagacaaggccctttattgttcaaagaaccaaagaatataaagtttccaagcgtctttgtttctgtgtcagtgagttttatgcttcaaacagaaatgattcatcctcactgatattctttaacctattaaatactgacagagaaaatgcatgcactgccattttcttatgccacgtgatatagtctttcaatttcatcagaactccttttccttcgagggttcataagtctttaaatcagagaatacaattttatgctttctagccccaccccaaaaaagagcattccagtgaaatcattttcttttaacttgaaacccttcttgtgattcatctttactcagtggatttaatttattttaaaatggttttataaataagagtgtatacgtataagagtttgggatgtgattttgtttcagaggctgtgatattttggtgacagactcagccatcattgtagcaggaaggattagtgatgggaaatggtatgtctgatgagcataagagaaatttgagcaattatcctccatacctgagcccaggctttggtacttaagaagagtctgcaaatagcatgaactagccacaagtactctctgaagaccccttaccacttcttatctagacatcctactgtgttcctaactcagaattgcttgccttttgactctcagaagctttacaagatggtcatttacttacctgcttcaaaaggaactagtgtggctgttctgcagtggagacgatggttttctaatcctggaattatgatcatatacgttcagttggtgccttgtggtttgtggtgaaattgctatagtttaaccagattccattatgtaagtccattcattcacctaccatggtcagtatttaaaaggatgtagactcccagcagttgctaacttacctaagagacagcaccaaatgaattttaaattagtgctatccttatctaattcctccaaatttggcaaattacctggcaggcagccaataggatgcttttttcctctttttattatcaccatcatcatcaatgtcattatttcattgtatttattgagccttcagcataggggttttctttgagttgtgttgcaaacaataatctattgagtgaaactgtgtaaagtgaagtaaattgcaaatattaagtgtatcagaacaacagagggacattggtgttcttggtcattagttgacttcccctaacaaattgaatattttataattaatttctaaattctcactgttagtacagagaaaaaaatcattatattattgttcattaaccttattcctgttatgttcaagacactgtggtagattctaagggtgacagtagatatatcaatgtcggtctcaccttcaaagagtttgtagtatggaaagggagattagattttgtcttagtccattttgtgctgctataagagcaccatagactgggtaatttatagtgaacagaaatgtatttggctcatgattctggaggctgggaagtcccaggtcagggagctggcttcttgttaggacctacttgatgtgtcatcccatggtggaaggatatggggtagagagagaaggaaggaacccatgccagtgacaacagcattaatttattcatgagggtggcgcccccatgacccaaacacctcctatcaggccacagctcccagcaccactgcattggagatcaaactttcaacacatgagctttgcgggctgcattcaaaccagagcagatttgcaaatgaataactccagtacaaggtaaaaaatagctgtttcaagtaaaccatagataaaatgctattagatatcagaggactgagagatgcctttcatttggagttattaatagcttcctaggggaggtaatatttaagtttagccatgaaatccagcagaaggaagaatcaagcaaagtggggaaatcaggacaggtgtggaaaactgagcagctgaaaggtgaaagatggggaaatttaggaaggcagataaaagctgaattacagagggctttgagtatgaggttaagaaactgggatgtggctgggcgtggtgtctcacgcctataatcccaaaactttgggaggcagaggtgggtggatcacctgacatcagttcgagaccagcctggccaacatggtaaaaccccgtctctactaaaaatactaaaattagctgggtgtggtggcaggcacctataatcccagctacatgggaggctgaggcagcagaatcgcttgaacccgggaggtggaggttgcagtgagccaagatcgtgccactgcactccagcctgggccaaaaagcaaaactctgtcaaaaaaaaaaagaaagaaagaaaaagaaaagaaaaggaaagaaggaaggaaggaagggagggaaaggaagaaggaaggaaggaaggaaggttggaaggaaagaaggagggaaaaagaagaaagaaggaaagaaactgggacttaactgtttaggcattgaagggtcagtgtagaatttagatctagaattttatgatcagggcaatttgggaaaataaacctgtcatgtcttgtaaggtgagcggtagaaagaaaactactggcagagattccaggggacagcttagggagggttaaacccaggaatgggatagtgtttggagagggtgttttgaaaggagcttctttgtttgctgagattgtggtgtatctacaaggtaagaggctctctgagggcacagtgaatatagatatcagcaagccaggcactgcctctcctgccctctggaggcttccctcttgaaagaggagtagggggtggtcacatgggacaagggagatgtggggcatggttgggagaaggaacattcctggccaggaccttgcaggtgcacaggacctgagctgctgaggccataggaagtgttttagtgggactgggggtgcctggactctgaactctgtcagcctctggtgagaggctcgggacactgggcattcctgccccagactggaaaaaacagtaacctcctactgtaatctgactgctcatgccccccccgcccaattcatatgtcaaaacctcaaactgtaaggtgatggtatacaacatagggcctctgggaggtgattaggtcgtgagggcggatctctcaggaatgggattagtgtacctataaaaaggaccctagagagctcatttgccccttccactatgtgggaatatagctagaagacatcacctatgaggaatgggccctcacctgacaccacaactgccacttccttgatcttggacttcgcaggctccagaactataagaaatgaatttccaggggttataatccatgcagtttatagtattttgttatagtcagccgaaagaactaagacactccctctcctcctttccctatccttctggaagtatcaatcaaaacacatctctacatatttctagcatcccccttgtagtggacaaccacccctagtcaagacgactacagcatagagaggaggtaggggctggaaaagggaacaaatacttgagagaggatctgatcactaacacctggcggagggggggactttttctcagggcagggttggaggtaggagagttttgtgatgagatttgcctgtaaagaagattaagactgctctgtagagaaacacataggatctggcaagagtatgccaggaccatgcggttgcacaggacctgagccactgaggccatgggaattattttagtgggactgggggtggcagggatttttttggtagggatgggagtggcagggataaagactgtaagcaccagaggaccaggatatgtcagctgactggaggacttgtttatgtgtgctgatttgctgtcctgagtacaagtgaattcttattacacttttttttttttgagacagagtcccattctgtctcccaggctggagtgcaggagcacgatctcggctcactgaaatctccacctcccatgttcaagtgattctcctgcctcagcctcctgagtagctggaattacaggctcatgccaccatgcccggctaatttttgtatttttagtagagatggggtttcaccctgttggccaggctggtctcgaactcctgacctcgtgatctgcccacctcggcttcccaaagggctgggattacaggtgtgagccaatgcacctggccttattacactcttaattgtcatttaggagaatgtatatcctccccacccccaaagaggcataggaacatggcaccaatttgagacaaactagggcactgtcaaagctgggggcccttggtctaacagaggggtgccttcaggactctcccctcctgcaagagctgcctgaagccatccctcagatggccacccacacccagagccccagaggagttttgtttgaccgggggctgaagtccctagagtagtttcatttcccacttgataccttatggatgatgtcacaaagacaggaggttttactagaaaattctgcctccaccatctatggagagaacctcaggtatatatcaacagtgttcactttgggcaaggcaacagaagcacacttcttcttgggaagaaatattttgagaaggtatatcgttcattccctagaatgcttccaagaattttgctttgcttattttcatgtggttttggagagacttttcaaagcactcctttgctgatggagtttgtgatgattcatttcaaatttcaaaataaatttttccactcaagcaattcagtaaatcagatttcttccaaccatcacagccatacacttactgccatggtctgcctgcagctcctcgcctttgatctggaaagcgatgctaggttagacctaggatgtcaccttcacagggacccaagtccatcaggagccctggtgtcagcccacacccgggtttcctgttggcatgtccagtcggcagagttgagcaaccctccttgaagtgtaatgtggttattggcaaaataatacaaaatcggtcttgattttaaaaaaggaagtattcagatttttcttgatgaaatttaagagggaggtgatgggaaagagactatgcttaacaaaagaaaagagctcctaaaaacatttgttcttgattccccagagtccacaccgtagaaactgctccctcaccgtttaaggagaataccatacggattcttatgtatgggtactaattacgcaactgggcctttcgacatttttggagaagtctattttataatttttaataaatttgctcctgtaagatcagccatgttttgtatactgaaatagtagtgcacgtgtataaaataaaactcagtgtgactctcttttcccctggcattcttgggtcatattagtttaaactatttctgacccttactttattactgaaaacttgagtgtttcataccatataaatcctgagacttgcgttgtttcacattaagctaaatttgggcaagattgccagtgttctctgagactgcaacttcttaaactcaattattcactcatttttgtaaaaagataaaagagtggctgggcacggtggctcatgcctgtaatcccagcactttgggaggccgaggcaggcagatcacctgaggtcaggagttcaagaccagcctgaccaacatggtgaaaccccatctctactaaaaatacaaaaattggctgggcttggtggcgcatgcctgtaaccccagctacttgggaggctgaggcaggagaattgcttgaactgggaggcagaggttgcagtgagccgagatcgtgccattgcactccagcctgggtgacaagagcgaaactcagtcccaaaacaaaacaaaaaaaaagattaaagaatatgttctctatgccaggctcctcctgtgttctggggacacagtagtgcgttaatagaggagttcccaccctcatggaactgacacctagagaaggcaggatttgaacaggaaatgttagcaaagtagaaggtcaagttcagatgggatgtcttccagggaaaactaacctgggctgagctttaaggactgcttcctggaggatgtggcagcagagttgaaggatgagtcggaatgaggtaggagaagaggagagagaggaaagagtttcaggttgcaggaatagaatagttccaagagaaagatgacatgaagcagttggggggagatattgcggggcagattgtgagacacagattgccttgggatggtgagagtggagatagagaagtcagacctttccaggccttttggaataaatgagccttttggaggataagtgtaataaggccattggcaggttttaagcagggagctgtgcagtctgatttattgtaatataaccacacaggccaggataatgattggagtcctgttcctgggctgttgctgatctaatgtagcaatcatggcacttgagaaaagtggatgggttggaggcaaagctagaaggactcagtattgcattaattaataatccccttctccacctggttgcacaatgtcctaaacccgccaggagaatgtgctaatgcagtcataaagagcaacaaaataccatattttacagtaaggtatgtgaaacaatacactgacattttgttcccccataaaagtcaccaacagtgctatgtgcagcatggaaaagatctaaaataaatttaaaagattcagagtcaagcattaaatgctaaatgggagaggaaaagagggtagtaactccatgtggcctctgccatctgggaagacctgcagggaggacagagtgtggtggaagttcataaaatcctgaagttagtggaacttgctccctaagacctagaaacacagaacattctgggagtctttcagatttgtacaaatgaaactaaaactcataaatctgcataactggttactaacccgatcatagtacattgaaaatataaacaggtttccaaattcaaatgcaagatttttgtttctgttttgttttaaaccgcagttatgaactgcggtaaagctctgactttagctgttttcctgtattgtgacagtgcacctcacacatcctgaaacccagaattgggctggaagggccattgttttcattcagttaaatatttcttatgtttcaatgtctcttttaataaactctgtgttgcgcgtattttagacagttgggtttggtgtaatgttgtaagaagtgtgagccagagttcctagatttcacccttagcaggaagttgaatcaagatggattagccagggaatctcaggggcttaacccagtaaagagttatttctcacccatgtccctatccagtggagaagtgcattgttcgcgggtgtgttgagtatgtttttcttattttccatattcctgatgcactggcattaggggccttgattccggagacactgtcctcccagggctagctaattcctgaagttagcaaatgcctcccctgcctgcatgcctttgacatacaaatcaaccaagcccgagcccacacccccagccacctcctttatcaaactctcacccactgagcaggtgttccctttgcccagcagcaccccagggccaggtacccaacaactagggaccatccttacagccctgagcctgccagaattactcccattgtacaatcctaagtgtcctcagtcagcatacctaccctgcctcacctgttcctccctgtaagaaccccagtagaggcctgggccatgctcagcgtctctccaacctcctgagctccgtggcgctacctggcatggccttgccaggcatgctgtgcctcctgcttctagcatctgtgagtacgaacttctgcctccatgacaatcattccatgtctgcctgtcttaccatatctgttaaaactatgcctgcttcatttcaacacagtgaggctccatggagtacaccctcagcctcaacactgggaggggagaggcaagatggtttgcagggcaaggatcatttgctcttacccacatctggcaggaagagatccatcagttctgcccatatctgattggcaagaactagtcacagggcctagcacggcatggggtgctgggggatatcacttagttgtgtacccaggagtaagaaacacgtgtggcctcactgggtgactgcctgggcattggcaatcaagtttactttgcgtcatttttacttcctttttcagatttatttttagtaaacaaaagtgaaaaaagagaaagattgaaatttgagtttcatgtccttaactttatccagcagaaatggcaatagaggagaaaatccagcaataggcttatataaccaggagcttcacccggcagcgctggttgtgaatgtaattgtaatcactaacacttgtataaaccctgctttttataaagcaacctccgatactttatactactttttacggggaggaaaaaaataaattttctcttcatgaattcatagtgtcggaggcagaaagcataattttaattctagttcaggcactataggcatagcaggttaacttctgaaagtttgtaatttagcgtcctggaagttggaatatatcttcactcttgatgtaaatctagaagttgctagttgggatggggtgcgcttcctctgagccactggagtcttgagaggcccagagagtaaggtgggggcgggggctggctcagttaatgttctggaatcccggctgctttgaaacagtgctgctggaagctcctgaagggaaaggaggagagaggaaaagcaggagaaacttggtatctgctcttggacaaaaatgtcttggcagatgtcttggtgttgagggaatggtgccacctctacctcagttctccctcctgagccctgcatgagtgtgatgcctgcattgttcagttcaggtgttccactgattctgactaaatcaaaagtatacatgtaaatccagcccatctgttttcatgattgttaaacgccgtctcttctgaccactatgttataacattgtcttgaaattttgcctttgtcagagccatttctgaatacattttgtggtttagctggatgatgatgtaatgtttttaatgagcatttaattgaaatggcatctttataaaatggcatcaacctagctctttggaatattctgaaataagttccttgatcattttgtctctttagaaaatgagacatgcttttcttataaattgtggcttttcccacaaatattttcaaagagatttttgcagacaacattttcgggctgttactactaatgttggagagctcatgtggttttgtcccagatgttcacagtaggctggtttagtgactatgtttccagacctaatttggctaatcctatgttagttatgtctgttcctgaaccccaaccagatttcatgactgataggagtctggaagaacagactcacctgctgccttgggtcaggggatcctggagccacacataacactgaattgtctctaagagagcatctgggactgtgtttctgtctctctcattttatgacacttttcatgcatgccataagcatcatcattatattaggtttgtatcacatgcaatcacagatcattctaaatgtgacttagtattttatcaaaccaagcacatggagaacttgtgttaccttttctgttgttgttgttgtttaccctgtagaaattgtcctctggatttctgagatgggtaatgccctcctgtctcatctcagccctcaccagtgttggacctgatcctgaatttgcaaaaggcaaactgatctcagtctagttccggtaaatgccagccccactgatgcgatggggaggcgaagccttcttagctttctccttgccctttaggcctttgtgtaccagtgacgggtgtctgcgaggaagagcttggctcttggagaacacaggtttggtgagatcacatctctccatatgcactttggataaatttctttatttatagagacttttttggagcctatacatttgacccctgctgacctcaccgctgtagccccacccccacctcatcagctcacctttccacctccgcgcccaatacaggctggttttctttttgcctgaaatgttcttccccctctcaactgacccccaccccaaatatccatctctgccccccatactactttctctgaaattatgctcttaccatggtttgcacagacggtagataaatactgttccaaaggctggcttggggaacccaactattcccggtttggggttttgtccccctttgaaaaaattcacttgagattttaaatatctgactaaagtgaaaacaggaaagactctcagagtggtagaattgtaacagagctgttaagatttcactcagtgggaaggaatattttgtcagcaacttgctttaggaataaactggacaatcgaatggggcttttccagcctgcattaacagcaagctgtagcttggaaacacctgcatgacaaacactttcttaggacttcttttttccaggagtagcttattggcaggttttaacaagaaacgacacccacaggtgtttgcctctaaaactgttgaaacagaaccatctagtccccagggtttccctacagggtgtgcagggtgatgactgtgacttgtttgaaggatgctatcttttcagaggctcttggcaagtcccagaatctcaccttggtttgggactttctcctccaagggaataaactatttccagatggtgttagctttgcctagggaaggaagtactctttcctagactgaaaactaaaatgcaatgctgagttacctctccaaaacaaggaactgaaatattaggcttagcccatcttcattaaagtttaatgctcaaattaccttgtgtgttagcattttattgaatgccagtagcattcactgtcatgacaagttagaaattaatgcattgtcagccggatgccgtggctcacgcctgtaatcccagcactttgggaggccaaggcgggcagatcacctgaggtcaagacttcaagaccagcctggccaacttggtgaaacccccgtctctgctaaaaatacaaaagttagccaggcatggtggtgggcacctgtaatcccagctacccgggaggctgaggcaggagaatcgcttgaacccaggaggcagagtttgcagcaagctgagatcgcgccactgcactccagcctgggtgacagagtgtgactctgtctcaaaaaaaaaaaaaaaattaatgcattgtcaaactttagaagctacatttagaaaacatcctttagatttctctgtttctgctgttctgccaaattgccagcctctggtacatagtcttaagggttcccctccatgcaggtgttctcttcataggttaacattcagtcctgaatgatccaagagtttgtctcatgtaaaggccatccagcttcatgaattgcgttgctctgtgcgaatgcctcatgctatttattttattttcttttaaaaatgtttttttcttttttagagactaagtctcactctgtcacccaggctggagtgcagtggcatgatcataacctcaaactcttgggctcaagcaaccgtcctgcctcagtttcctgagtagctgggataacaggcacacaccaccatgcctggcttcttcatattggttctctctcctgattgcgtagaggactgtatccgaccccaatgtctcctcctcagtctgacgggagagatgagaattctctctgttagacattctgtcttcagtgtatgttctctgtatttactccacctcctcctatttcttccctctgaggcagtggttctcaaccaggattgatttttgcctcccaggggacatttggcaatgtctgcagttatatttggttgtcacaactaggatgggtgctactggcatctagcgggtggaagccagagatgctaccaagcagtctgcgatgcacaggtcagcccccagacaaagaattatctggcccaaaatgtccgtagtgccacatttaataaactctgggctaatgaaatgtccacaccaactcagaataaaaggtcagatctccaggcgttcctggcactcccggagttgttcactttctgtgcttccttatgtggtataaaatttctgtcatatgagtctaattttctgtccaccgcagttctctcctggatatttcctttccattaggtgtcagtatttcaaatgagtacttcttagtctaattgtttttttctttgaaattatctcctgtcattcttaggagtccatttttctaactcagttaattagtacaaactctcatttacaaaatttacagtttcttggccgggtgcagtggtgtgtgcctgtaatcccagcactttgggaggccgaggcaggtggatcacctgaggtcaggagttcgcggccagcctgactaacatggtaaaggctgagacaggaggatcacttgtacctgggaggtggaggttgcagtgagccaagatcatgctattgcactacagcctgggcaacaagagagaaactcagtctcagaaaaaaaaaaaattacagtttcttactaaccatgtgaccttgaacatatttgacttctctttgctgcaccaagttcctcatgtgaaatatgcacataattatactatttcatgtagttgctaaagtattaaaggagctaatatgtgtaaagtgcttagaactgtgtaaagtgtttatataagatattttttaaacatagaatttcttggtcaggtgcggtggctgtaattccagcactttggggggctgagacaggtggatcacttgaggtcaggagttcgagaccagcctggccaatatggtgaaaccccgcctcttctaaaaatacctcaaaaattaaccgggtatagtgatgcacacctgtagtcccagctactcgggaggctgaggaaggagaattgcttgaacccagaaggtggaggctgcagtgagctgagattgtgccactgcactccagcctggtgacagagcaagactctatctaaaaaaaatatatatatatatgtatatatatatagaatttcttataatgtctaaaaattttgtttattgtgtgtatatccataaaatatgaaacatgttctatgtcctccctattaaacaaatactttgtatgttttagtccctgactcaaccagattggaaatattggtattagaagaaaattcaaaaagttgtcaaaccatagctacaaattttgactttcagcttagtctcccatgcctgctaacccttttgtctgatcagagttttctctagggccccttagggctaatgtaggtgggacttcaagcacatagatcattgctcttctcaattcagatggattaatgagcagatgggttgagatggagatgaggaaagacatcctaagctatgttgaggagggagaagatctgagactcaagtttctgctgttaaatccatgaggctgatttagcagctaagaatacaggccttagccttttagagttccctatctgataggagccttagagataactcagttgtcatcatttgcatctgatataaaaatctccattttatgggtggagaattgagactcaaaacctaaacttttaaaaaatgaaataatggcagagctggaacagagagcagggctgttattgggttttgtaactcttattacggggactgcctccactaaccctagttcccttctctccacctcatgttttctttgttttggaatatggtcatgtttcattgctgtcttttcttcctctcgtgaacttaaaatatgaatcatttggtaccaagttttcatatgtcttcctgtattcatatgaccagaaccagtcttctccatcccaaacaccgctgtttatctacatactccagccaaaaactttcttgattcctcacattcttttctaccctacatccaaatcataagaaaattttgtttgtttgtttgtttttataagagacagggtcttgctctgtcacccaggctggagtgcagtggtgtgatcatagctcactgcagcttcaacttcctgggcttaaggaatcctcccacatagctggaactacaggcatgcaccagcatacctggctagtttttaaaaaatttgttcatagagatagggttacccaggctggtctcaaactcctgggctcaagcagtcctcctgcctcagcctcctaagtgctgggattgcaggtgtgggccactgtgcctggccaaatgctgtcatttccaccttcaaaatatttccaagtggcttctgtccaagccactctgggcctgcattgttcaatagcactttctgtgaggatggaaatgttctgtatctgtactgcccaatacagtcgccattagccacatgtggctattgtgaatttaaaatgactgaggaactgaagtttttatagcagctttattgggctataactcatataccatctaattcattgaaagtatgcaattctatggtttttaatatattcacagagttgtacagccatcatcacaatacattatagaacatttttatcacccccaaaagaaaccctatattcattaagaatcactcctggccgggcacggtggctcatgcctgtaatcccagcactttgggaggctaaggcaggtggatcacctgaggtcaggagttcgagaccagcctgaccaacatggtgaaaccccgtctctactaaaaatacaaaaatcagctgggtgtggtggcgcatgcctgtaatcccagctacttgggaggctgaagcaagagaatcgcttgaacccaggaggcagagattgcagtgagcagagatcaagccattgcactccagcctgggcgacagagtaagactccatctcaaaaaaaaaaaaaaaaagagtcactccccatttctcccaagcacctccagtacctggaaaccactgatctactgtctgtctctgtagatgtgcccatttctggacattccatagagatggaatatgtggcctttggtgtctggcttcttcacttagcataaggttttcaaggttcatccatgttgtagcatgtatcagtacttcattcctttttattgcctaataatggtgttctatcatattgatataccacattttaccatttcacagtggatggacatttgggttataaataggctattgtgaataatgaataatgctattcattattttaagctattatgaataattataataatggtgctatagcttttaagtacaaggctttgtgggtttcattcatatgttttcatttctcttggatgtgtacctaggagtacaatggctaggtcacatggtaactgtacataacgctctgaggaactgcctcacagttttccagggtttgcaccgttttactttcccaccagcagtgtatgaaagatctaatttctccacatcttgttattgtctgtttttctgtaggcaccccggtgggtgttaagtggtatctcattgtggttttgattttatatttctttgatggctaatgatgttttgctgttcttcatgcacttactggccattttgatatcttctttgcaaaactgtctattcagatcctttgcctatttttaaattttttgggtggcctttttactgttgagttgtaagagctctttgtgcattttggatacaggtttcagatacataatttgcaagtacttttttccatttttcaggttgtctttttactttcctagtgttgtcctttgaagcacaagagtttctaattttgaagaagtccagttcatctacatttttctttcctcactgtgcttttggtgccatatctaagaaaccattgccagatccaaggtgataaagattcatcgctatgttttatcataagagttttatagttttacaactcaaaaacaaaaagtcaaatactgcatggcctcacttataagtggtagctaagtaacgtgtacacatggacatggagtgtggcatgatagacactggagactcagaagggtgagagggtgggaagggaaagggtgatgagaaattctttaatagatacaatgcacattgttcaggtgatggagacactaaaagcctagacttcactcccatatattcatgtaacaaaattgcacttgcaccccttaaatttacatcaattaaaaatgattttatagctttgtttctatgatccatttttaaaaatttttattatgttaaaaacatcatcttttccattttaacattttaagcatacaattcagagacattaattacagaatgttatgcaaccatcaccactatgtttttccaaaaattttcatcaccccaaactgaaactctgtgctcattaagcaataactcctccttctccccttcctccccagccccaggtaggaatgaagtttgtattgtattttattttaattaatttaaatgtaaacaactaaatgcagctggtgattaccatattgggctgcacagttataacacgactagtatcatcctcttagatagactgctacagtcatttctaagctggctttgcatttattattatcctatttatggttatctatggtccattctcccataaaagctggactattcctttaagaatgtaacttattccatttcattcccagctctgaatcttccagtggttacctattacaattaacaaagaaatccaagctctttgctgtggtccacatttgtctgcccctttgactgtctgccttctccttttccttctcccagtgcctgcagccccactggtcttcgtaatgatccttgagctcatcaagtgctgtctgcattcagactctgcacagtttctctcctctgtctggaacactcaccctgtagatccccatttaactctctccctcgtaccattcagatctgctcaaatgtcacctcctcagaaagattgttccagagctccctatctaaaatagccatgctattactctaccttatagctcctgtgttttattcttattttttattaagacagggtcttacactgtcacccaggctggagtgcactgttgcagtcatggctcactgcagcctcaaactccggagctcaagcaatcctcccaccgcaagcctcccaagtagctgggaccacaggcgagcaccaccacacttggctaatatgtttcttttcttttcttttttttcctttttttttttttttttttttgaggcagagtctcactctgttgcccaggctggagtgcagtggcatgatcactcactgcaaccttcacctcccaggttcaagtgattctcctgcctcagcctcctgagtagctggcaattcaggcaggtgccatcatgcccagttaatttttgtttttttagtagagacagggtttcaccatgttggccaggctggtcttgaactcctgacctcaggtgatccacccaccttggccttccaaagtgctgggattacaggtgtgagccgccgcacccagcagctaatgtatttcttcatagcacttattacacctgacattttatcgtgtatctgtttaaggttttatgtcctgtctcctcactagaccacaagctgtataaaaacagggaccttctcttcccggttttcataatagtgcctggcataaaataggctgtaagtaaatatttgttgagtacataaaagaagaatcttattcatttcaaggctataatctatgttagaatcaaagagatggtctccatactaaactgaagtatttcttcattgaggcaggcatttaaaagtgttgcacctgttagtaaaacagtcttaaggccagttcctgaaaagtgaactcctacaattttgagtaactatttgctaatacatcagcatgttgccttcttgggattaattcagcctttcttttacttttttaacttgctcccttccttcccttttaatgaagtcatgcctaagctccagtctgtccttgtcccctctcccctaagctttgagaccgttcctttttaagtcagtggccatgtctcgccccgttctcccgatataactcttactttacccagcagcggggcctccgtttagtgcagcccgtgatgttgctttcctggttcatcttcccttatccacagatttacctggctggaatcgggagactgtgtgtgcccaggggctggattcggagacccatgcttctgcagttccacttatgactccatcattatgctgttttaggaaaataaatagatattgattctctaataagagtgggattgttcaacaagcattgggaaaatctgcgagcccagatatgtatgtatagcagctactggttggaaatttgaacacaagcatccttatctacccagcctgcgggccacagaccagaactgagtataaaaaaagaataaaaccaaatgccacatgttgtctcttataagtcagaactcaacattgagtacacatgaacataaagaagagaacaatagatgccggagaacttgacaagagagggagagaggaaaggcttgaaaaactacccattgggatgccaggcacggtggctcacgcctgtaatcccagcactttgggagcctgaggcgggtggatcatgaggtcaggagttcgagaccagcctggttaagatggtaaaaccctgtctctactaaaaatacaaaaattagccaggcatggtggcgggcacctgtaatcccagctacttgggaggctgaggcagagaattgcttgaatccaggaggcagaggttgcagtgacccgagattgtaccactgcattccagcctgggcgacagaccgagactctgtctcaaaaacaaaacaaaacaaaacaaaacaaaaacaaaaaaaaacactacccattgggtactatgcttactacctgggtgtcagagtcatttgtactccagacctcagcatcacacagtatacctttgtaacaaacctgcgcatgtaccccaaaatctaaaacaaaagttggaagaagttgaaagaaataagaataaaggaaggttggcagtgtcatccaaggaaactaagcctgatattaaaataggctctgaccactcaggataaaaaacagacttctctgtgcaggtgtagcggagatgatgaaacaactctattagcattctgccttagtggttgttatagtcatagccatccttgaaaagaaaaaaaaaaaaaggaaaatataggaaaactgaggcttaaaatccttcttctattttctaaacttctgtcattggagtgcttgcgttcccccaggtgatagactccggaagctcatacagttgcagatgagaacatgagtaataaatacccccaaaattctttccaagttcagtcatgatgaattggtttaatatgcatgtagttatctttttattggtccataattccaatttagcaaaatgtaaagatgaatcataaagaatacctggaaaaagccccaacatcgatggcacttaataaagatagatgagtatgttcttactcctttttttaaaacaaactggacaaagataaattttaatgtttacaaaaatgtaaatttcagtgcagatcaagcgtttggttggttggttggttggaagcttgactttatttgcttcatttggagagaatataagatgaaaaagttcatcattagaaagagaagtaagcattagagtcacaggatgggattttgaaatactctgtgagttgattgatgttcctaaagttccctgtttaatgctctgagttaaataggtggccatgctcagcttcttggatgttaatagtaacttctttgtttttcagatactgtgttgacaagtggtcatgctaccgactatttatttgttggaaatattgtttacacagtaagtttatctctgtttattaagccattcttaaacagcttatgtgtggcttgcacttctctaaacccttaaaaagggccttcctcattattattatttatttcaaatcttcaaaatgtattttatatatccttcaaagttcagaatggttgtgaaatgcttacatcatcgtttctgaaggttatgccaagtgaaggtttctgggcaggtggttaacagatttccccattcttcaaatgaccattttacacctacctgcaaaggaaaacaacactcaggaaggtggtatctcccaagctaagaaaagggcaaaactattatttatgagaaagactgttactagaatgaaagctcttctggaagtgaatctgcctgtatgtcccctgaaaataacccttagagaattagctactgacatggctggtgctttcaaaccggagctgccttggggaagctagttctggagtggagagatgggatttctcatggaaagtgaaaataactcattgagaataatgtgtttccaaactgtcttttattttcacagtatgttgttgttactgtttgtctgaaagctggtttggagaccacagcttggactaaagtaagttttctctagaattgtttctctgttcagtatagatatttttcatgctaggatttctttttaagccttggggaaaccataagcaatatctggctatcttctttcagattttctgtgtaaaaattgtggtttgatcttgatcagggtaaatttgcaatccaaagtctcttggtgattcatttgcttggcacgtaatacagctctaagctattaacagtcatctcacttcaaatgtatttgctcattgtaaaaacaaaaaccatattatacacacacatatatggaaaatatagaaggacaaaaaacatttaatgtccataattttaccaccaagagacagtcactgttaatgctttcctgtggaaccttccggacttcgttctatgtctgcatgtgtgtgtattttttaataagatgatgcattataaaacataggactttgtaatcccttttaatttaaatatatattaggcacattttctgtgacttaaaatacaagtcaacaaagttattgttcttgattaaagagtattacgttttacagatgtcccaccatttacttcatcactctcttattttagacattttggttatttccagcatttaaagattataactaaagcttcatgtgtgtctctcatagtgtcatgacctggctgctgtttaaatgctctgctaagaaaaatggggatggggtggaaggtcagtgaggaatcagggaatcccctaagagacagtggcaattaatccgggtcagaggtgatgatgactttgcttacgatgttagaggaggaggtagtgagaagtggtcggagtctggattcattttatctttctaaaagctaacagagcttgcacatggattagattgtggggtgtgaagagagaaagaagtcaaggatcatcacattaagaggacaaagaagaaaaaatgaacaacgcagtagatgcttaaaggggcattgttaagaggcaatatccatttcagatttaaaaataaaaaactcttggctaaaggaatggaacaaagtcttgaaatgataaataaaaacatcttatttattttgtctgttcagccactctgttaccagattaatgagtccttgttgtatacagccgcaggttggagcaaacacttgctatgaactgagaggggcccgctgttactatgggagaaatcttagagtaaggtcacctgtgacagcaaaagcaccttcatcttcagggtactttggggccattcattacttgaattcattgttaaaaattctgagacatgggaattagaaagattgaacttcccattaactggtgagtcatcaaagtctttccataaggaaaggtagcttggatgcaaggattctgcagcaagtggagttggggtgaatctgccaggctggtcgagaagcctgtctgagtgtctatttccctctgcagttcagtcatctggctgtctggggaagcatgctgacctggctggtgttttttggcatctactcgaccatctggcccaccattcccattgctccagatatgagaggacaggtaagtactcctgattgggagtgtgtcttctgtgtcttgtgacagcaatgtttctccatgggcgggtgagcaggcactgtgtgtcttacagccacgatgagcttcaggagaggctggtccttcctgcttccatcagaatctatcaggagataaaccaaaccaaagcacctggaagaggtcatccagtccacagaaaaggcatttgaagtttcaagtattatgaaaactgtcaacttaaatcctccggcttattggcatgcccacatttccataataaattatgtgttaattacacacagtaccaatatgtacagttggaaaactggagctattttgaatggttcctaatccattgattatgttgattacagttttgatgttgtactctggtttgttgttatactctgctgggtcacctgtgacagatgaatctaacagctctatgaaccagatcattgataaaccagaatctctcattgttcatctctttgaactagagaggctgagattgaagacctttacactcatttgaatgttttttattttttccttcatattatctttgtccagtgcataagattgagccatcaacagtgacaaactgtatcctagaatcccacagtattgggtgtggagaggaatgagctgacagtcctctggtacacacctcctcagtttaccaaggaagctgtgcaggcccaggtctccaagcccaccccagagaccccaccctggagttgcccacatccagcactgcccttaaaccccaagaggctgctgggccctgtactttaaggacctctgctctggccttctgtggctgggtgtgttcctcggcacggagtgaaaagctatgatgcacagagtccatcttcccacttgtaatctattctctgggctcccaggaccccttgtttccttcccaaacagccaaaagcctcctgcccaggcctgcctggtcctctctccatatctaggccagtgtgcacactgggccaaaggggcagctgttttcaagggtgtgcactgagtagatgatgtttgcaccgatgttcccgcccacatttgcaggatgcttgtgcaggggcacagaacccagggtgggatgggaactgtgggtcaggctttcattggtgttcctgccccaggatacatactttagggccaggcctgttcatggcacacctggctgctatctctgctttacttactctgtagaaatgagcaaaacctcctgggtctatccaagtctggaccatgtctagcaactgtttctcgtgagatagcccagggtagcattacttgccatttcacctggtagctctgtcagctaatagcccaggtcgtctgagacctccactgagtgtgggtgctgagcaggacggacctgtcctataggagtgggcttgcatgtcctctagtgcatctttgctttctgtgaggaaagaggacaaacatataacatgcttttcagtttttttccaaatccagacagtagaggaaattagagggcgttcagtgaacccagaagattgttgtgtagcaaaatgagcattttccaacaaagatattttgtgtttaaataaatcagttctattttaaagcaatgtgattgatccccacaaaaagcaaaccaagaaaagtatccactacaagacaacgatccattggtaaggcattggtgcttagaatatctgctttgtgttctcttccttctggttcaggatggatctgctgtgatgaatatttcatttggggaattttgtggtgatggacaatagatggggcctcagccaatggccatagacagtgttctaaattagagagtgacagctgacaggacggggtcgcttggcatgtgactgacagacaaagcccattcctttgaaagctcctcctgagtcctaaacagagagctgtgccagggaaccacatgtacttcagtaactccaaatgtgcgtgaattaggctgcttgccaactctcactcccatcgagataccgactttccaactgcagaaggaccaggctgatcatgcagctactaaggtgccgacattttcactgtaccagtcacataagcatgatggtctgtatggttataaggctcagattaatggtgacattcacatgtttaaggactcttccagcagaactttagtgagttgtttctaccatccgaaagcaaagaagtgatcatattcaaccacattgcatttttctgtaaaagcttatttttctttaaaacatgtcattttaatcactttattggttggttcccatgaagcagatgataatgatgtgaaatagatgatagctgggtgaaaccgaggttttcattaagcagtacatgagaggattaatgtggttctctagtggccggacttccgagtaggtactctgctgtctgagtctaaagaactgtgtatcatctctagccttcctccagggcagggggctcctgagtgggtaaagggggccaggaaatgtgtaactttagtgtcacagccaacttttacactgtttcacctgcagtctgccactctgtattttgactcagtgctttgttcattctttgaaaaatggcagggaagtattacaaaacatttttttaaacacctttgaaggattgcttgggtggatagtggcttacactagcctgaagtctcagaaagccttcctcctggctcaggaggacttatatgctgtcataaaaaagaggaactgggttcaggtgtagtcagtaaaaggaattggctcttttggggaattactaaaaacatgcccacgccctgttcattcctgggggtctaggttggtaactgcttaggagtaaagggtattctaggaaaaggccactttttaaaatgactgtttgaagaatgcttctagtgatttttataaaccactttttgtagttcactaaacagtaggtttttggcaagtgaacctggttatgtgaagttctagaattaaactagtgcctaatagcaaacagcatttctcactcagaagccagaaagagatttgacacacaaaacattctgtctattcataacatcttcagccattgaaaagatgcattgtttctgctgggggtttcctaaactaatttgattaaatatttctttgtcttgtccattatatttggagtttttctcacggagaagaatatgggttttcccttgagggcaaaggaaaggaagggctatagaattgaattattctacactatcaaagagtctttatcttccctaaatcacctcatgacatggtatgtgaaacccagccagacaacatgtcaggaagtcccagtggaagtttctgaaatcaaagaagtcatctgcatccttcccctcctgaaaatacgccacatttgtgggattttaaggggcatcctgtttttccgtttttctcttttgaagcttggatttatagtaataaaaacttaggttgtgtctatcctggggaatgccagtcctcggctatggaaaatacatgatgatgttttttttccgtgggggaccaggtgtttttcttttccccagtagaataaccatgagataaaatgggtccccaaagcaaatacttgaaaatggaaaatgacaaaatcccttaggtcaccaccttccccaaagttgcctgctgaagtagaactttgcattggaaagatgatggaaacttgatcctagaccaggtcaggaaatgtgtttctgttttcttcatgcatttcccagcacttctgactttagtagtgctggagggaatgccatcttacttgacctctgttcaaaagtccggagacctggctctgttcatgccccagctatgatagttacgtaaccattggcaaatcattttacttgcattaatctcctaatcagcaaagtcagaataatgccacccaacctaattactttagagaattgtgatgaagatataataggctaacctgtgggaaatctaaaacatggatgctcttctttttcctggagtgatgaattgtttttgaaccttcatcaataagaatattgctgtgatttgaactccaaattcttttagccaaagaatttgaacattttataggttctaaatgggatgtttttgagtaaggtctattgaccacctgcatccaaatcatctgggttgcttgtcaaaatgacaacccccaccccccaaaaatatgtgcaggcaatcacgtacacacacagagacacacaatgcacacacacagagagacacacacacagacacacatatacacagacacacatagtgaattgcaaactctgggtgtggagccccagcatgtgagcttcagtaaatctccaggtgattcttccctttaaagtgtgagaaccactgctttaaaacacctaaaatatgactctattagaatgttttagctcctgctgggtgttacaggagaagatggtacactgaagatacagctgagtgattgctcatgttaagtggttacgtaggatgccagctggtgacggtgaccaccgtaagggcagctagctttcaaagtagggaattacaccacgagacatgaaatcgttaaccatggaaaaattctcctcactaacttttgctgcttttcctttaaagttcttttcattgctagtaagagaggggagaaaaccttttgacttcaaagcatacaatctgcaactctgcctgcagtgacaagctcctgactccagccagtttctggactgggacaggctttttttttttttttttcattctaaatacaggaatgggtttactcttgagttttatgtacacacttgtgtacacacaatgcaaatcccagtggactgtaagtaaacagagggaggaatggttctgtcatcagtgaatcagtgattaattcctcatcttctccaattgtctcccctggatttgtagcaggcctaggtatgttccatgtgaaatttgcaaagactgatgtttgtttaccagttgtatgtgctctaggaggtaagctgagaagttggggtgatgtcaagtaggtggccatctttgctcagctaccattccaggatgtctgtggaggatgggagcttaacggtaggaatccacccgagggtcaggagaggacttgttttcaggttaaggtctgtgtggggcatgtttggttgtcccacatccatcctccttcaccctttcctaagggtgcctagtgtgtattcactgatgtgctgtgacttccacccctaagtccaggtgaaagcttcatcccatcccccctgccacagtgagcgggtcaggaagcctgaaggagacacagggagacacttgctgggggcttccaggatagcagcgagtttgctcctaaaacaaatccatgaaagagctggctttcccatctgaaccatgtgggtgctgctgtgatgctgggaatgggtcagccacaggaggaaaaccaccctcagaatcctactatagcctgaaagatagactaggaagacaaaaagacaaacaaaaacaaaagtgtcttttttttattgttttattactttttatttgacaagtaaaggactccaaaagtctctatgcaattgttgagacactgtatgaagccagcctcgaagcccatcccaggtggggcgctcagtgagaatttcctgtgtgctgcccggccttgtgggtagccccggccaaggaatcctctcttcacccaagtgcgggtgttgggatgttcccttagcttcctcagccaaggaaataaacgcttgttaaaaacaagcttaggactttagcatatttaaactgttttattatactcaaagttacagattggtttaaggagctggtaaaaattactttagcactgcaattattagttttttagataacattccagaaaacactgaatgagcatatcttaaggttactggaattaatctttaatgcaatattgaatagactcggtccagttttcctcaagtatcgtattttagaaacccgtggcatggctggtgaggagcggtcagcctcgtcaaggaggaagtcctatcagcagagattcacctttcggtttggaataacatcgtgacatctttttgtacagttttcttgagtattgaaattggcccaattattcattgaagtccaattcacattctggcttttcaactcatacattttgtggaatagtgagactcatttgcaagaagtaacacactgtgtttctggatgacattctcatctgaatgcaaagcacaatgagcgaagttaagacagtaccgacttcctggcttctgctgcacctatgactgttgtcgcctgcaccccagggtcccccatccgtgtgcatttccttcctagaaggctcccaacaccagtccctttctgaggcaatccctagaaccaaaaacaaaactatagcaacaacaacaaaagcactttgggaggcctgggtgggcggatcacaagttcaggagatagagaccactctggctaacacagtgaaaccccgtctctactaaaaatagaaaaaattatccaggcatggtggcgggcgcctgtagtcccagctactcggaaggctgaggcaggtgaatggcatgaacccaggaggcggagcttgcagtgagccgagatcgcgccactgcactccagcctgggcgacacagcgagactccgtctcaaaaaaaaaaaaaaaaaaaaaaaaaccttttaattggtaataaagaaaaatcagaaacattcagttgagcagtgctagctaagtgagttctcacagcctgtaaatatttggattctaaaatcagaaaactcaggcatccatcagacaacagttctgtcagaattggcttttgtcatggttacacataatgccaacttgtttttgtttttctcctcctgcttaaaaacaaaggagaaagttttttaagttggaagctccttaaagtggtttcagattctttctacaggcggtgatgggaacagaactcccgttatcctaattgcctctggattctctggaatcctcctggattaaagtgacccgaatccgatttctttcttatttagtgcaaattgtaactgtgaaagtaggatttgaactaaattaagctaatgcctaagacatttatgaagctaattctattgtctgtaatatccatacttgcgttatttctgagcttgtttttcaggtatatgaaggagataatatctatcttaggatttaatagggaaattaaggaaaataagacatgtcagtaacagtaggtaatgtttattgaacaattgagatgagaaaagttctcttgtccccctggcagggcgtgtgagaggggagtggctcgcttcttcagcgccccgctgctcagacctctaggggagcatacagatgggcaggctgtggggttctgaccccacggtagtgtctaggggtgaatgtttacagctcctgaaccccagtgggcatgtgttacagggtactctttcagtttagctgtccgtaggcagcttgtgtaaaccagctcagttagaccctctactttgtcacaaggacagagggctttgtgtatcccaggttcttgccttggtttaccggaagaatcagatcacacgtgggcttggagaatgagtgcaaggtgttattgagtggaagtatctctcagcagatgggggagccagaagggagatgacttttccctggagttgagccacttgacagcccggctgtcctccaattgttctggccaaactctgtgtcattctggcgataggtggcctgacggcgcgcgggtgcctgtccgtgcattcctctagacatctggctttccagtgttcctctgctgatgtgtttctctcaacgtccagccacctctgtgtctgctggctagggtctcgatttttgtataggcacaggataggggcgtggcaggtcagggtggttttgggaaatgcaacatttgggcaggaaaataaaaatgcctgtcctcacctaggtccctggacacaggcctgggggtggagccctagccagggaccatgcccttcccccattctgtatcatttaaagggaccactcccttcccttcccagcacttcccttccatatcacaattactacatatcagacaaaacatattcatgaaaatatgtttaatatatgcagttacatgtgtaatgaagtaagcattggctcattcagtaatctgcaaccacatgaggaaactgaggcttagagagaaaggatcagtctcttgaccaggcagggagtagagtggctgggattcttctggagtcggttggactccaagctgggtcttctcactttgtgactatggaaagcagctacagtgatgatgaaccaggtgtttgagaaatgttgctcaattctccttaacgttttgcttttaataaattttatctgaagtgacttaccccgcaatgcaatagaatttttaaaatatgaatgttgagttagaaggaataagcagactttgtgtttgagctgcaatcttctgtccacgagcccaatcttttttaaagtaaagcaggtttcaaacaacaggatttattttttacgttcattatagaaagccctcatttttttagtccttgtcctcccttcccccgtatacaatttcctccattttggcagtttattttctttttggcctctcatttcaaggatgctgtgtgttaattagaggccccgcggctttgattgagtggtttttttttttcttcagaggttttgttgtggtgttggcatttgtcattcattctgatgttaatttttaaaatatctgtcagcaaattaaagtacacattacatgctgattttgtttgtttgtaatatttatgctcagtggtcacagtgtacgtctgatgtggttttgaacttttcctttcttgaaacatgtggaaatgtgtatgtgggccactcttattaagagtctgcacaggggttttcttctccaacatcttcagagggaggtggccttgtctgatgactggaggttatcatcatcacagttcccccacccagagatggcagggatcttcaggtttatccaatttaaaaggtataaaagtgccagagaaaggccaccaagtccggttatgcaagaaaacatgaccacggtaggttagagaagagagaaaagagaagcatagcatgctattaggcatgtaccaagaagtttctgtttcatataaatgatgatgcaaaagctattgtggacagtatctgagaggcccaaaatactgaacagacttaaaagtaggggatattttcagtgactattgcttacatcatcattgtaacatatcgaagcatccactgagtaaattggatgctttctgaactttgattagccagctgtcataagtgttggcattcctttggctaaagacaagaaagagaaatctaggtcgcttgtgtctgtgcttgtatgtatacttcgattcgcaatacttttttagtgactgaaacctgatttcaatgcaggatggaaactgaaagacaggcatatttaaatgtgcagagtgctttctactgtgctctgaagacaaaccctatccactttgctcagcaggagcaaagacatctctcatgcagggtacagtgacatcttgccatcttccgcctgccctgcgtccattcccctcacccccccgccctctttcggaatgcgcattcaaatggtgctgcttctgcctctttgccacctctagggtctggatctgtgacccaaactggtcagccgggtcctctgcctcactgaccatggcagttgattcaggaatgcacatggtgccccaggctggagtatcacctagagacagttcaaggattttttacagaaactaattgggggatggagctcttttgctgctgggtctcttataggaggacggtgtcagcctggagcggctaggacaccctgcagaaggtggctggctgaggatgaattgagcacagaggaagggtgcactgagagccatcagcattgagcacacccctggatccagctctgcctgaagctagagccatctctgacctgttagatattgtcgttctatagcagaaacacagttggttccattttcctaccatgcatctaccaagttggagtaggaagggactttgtctactttttatagacttcagtatgtccttcccccagcttctttacccaaggaaaagaagacagcgttgggtagaagcgaattgtttgaaatagagagggaaggaaataggagcttttctaagcgaggcctctttctcttggcagccaacaattctaactggcttagagtccaatagtcctgagcagtgctgtccaatagaaatataatgggagacttatgtataattttacattttctagtggccctattaaaagaccaaaaagaaattcattttattgatatattttatttagctcaatatttccaaaatattatcactttgagatgtagccaacataaaaagaagttagtgaaatagtttgtgttcctttttttttttgtactaaatctctgaagtccagtgtgtgtgttgtaactaccgcacatcttaagccaggctagacgtatttcaagtactcagtagcatctggccagtggctgctgtgttggacagcacagctcttgaccaacgcagatctggaaatgcagattcactccccaacgctaaatttagtgcaggcaagatcaagaggtaggaaactcagcctcagcccagatcctccaggttcctcccacacacttggggtgtgcactgcctgacttctattttagtcactcatcattgaaagggttttggctcttaggcaagactttccctaaaaataaaacttggggacaactgagctcttaatctatgggcttattaattgctttaagtggagtttataaatcaagatttataaagtgtggatctgactcaagtcatttttccacaatgttggctaatcattttctcctgaatgttggaaggaagaggtcacgacttgggtcatacttgtgtcacactgcaaccagctgagcaaaaagaatccgtgccactgaaaataggttaggtctgttccttctaaatggttcctttattatgtaagtgacaatttctaagcaagattattatttaatgtctaagattgtgggaacctctcacctttgtgtcctttttgagtttcagtcctctcccctcttattatgatgaatccaggctctgttatttttaccccctaagtatctcttttttttttttttttgagatggagtctcgctctgtcacccaggctggagtgcagtggcgcaatctcagctcactgcaagctccgcctcccaggttcacaccattctcctgcctcagcctcccgagtagctgggactacaggcgcccaccaccacacctggctaattttttgtatatttagtttcaccgtgttagccaggatgttgttgatctcctgacctcatgatccacccccatcagcctcccaaagtgctgggattacaggcgtgagccaccgcacccagcctttaccccataagtatctcttaaatatatctgtttccacccagtttcatcccatccagttagtttgcgcagcatcatttcttgcgtggacaattgcagtagtctcatgactagttcttagcatctgatctgcctggacccattcctctaccggagccagagtgatcttgccaaatgtaagtctgatgtcattgttccctggcttcctgttgccctcaggataaagcctggggacatttacctggcccctgaggccctgcgaggcttaccactgctccctttatgctctccctcacctcatccacactggtggcttcccacttcctggtgtgaggagcgagctcctacagggcgtttgtgcctgctcctctcacttcctgactgcactggtctccgcctcctaccaagttaatgcttacacgatgtttagatctcagatgcttgatcacttcccaagggaagcctttcctcacatcctggacctacgtgctcctattgtatgttctcttaacacagtttacctttcgcttgttgtataatactcaccacaactaaaactctacatactaatgtatgaggtgtcatctcacacccattgggatggccactcttagaaacacaagaacagaaaacagaaaataagtagttggtgaggatgtggagagatcgaaacgcttgtgacctgtcaatggaagtgcaaaatggtgcagctaatatggaaaacagcacggaggtggctcaagaaattaaaaatagaactaccatataatttggttaccccacttctgggtatatacccaaaaggattgaaaacagggcctcaaaaagataattgcacactcatatttataacagcgttattcaaaacaggaggtagacacacaattcaaatgcccgttagaagatacatggatgaacaaaatacaatatatacacacaatgggatgttattcaacctcacaaaagaaggaaatcctgtcaccattctacaacatggttaaagttgaggacattatgtaaagtgaaatattctaacatggttaattaagaattgaggacattatgcaaagtgaataagccagtcacaaaaggcaaatactctatggttctgcttgtatatagtgagtactcgtagagacaggaagtgccatggcagttgccggggctgggggaggggaaatgaagagctgctgtttaatagacacagagttgcagttttgccacatgaaaacgttttagagagccgttgcacaacagtgtgacttcggttaaccatactgaactttccttaaaatggctaagatagtaaatcttaagtttttatcacaattttaaaaatgtacgtttgtgtgatttactgattcatatcagcttctctctgtaaactggaagctctgtgagtgaagtgaatattctcaaatatatccttagtacctagtacccatctttttttggtattcagtaaatatttaaatgaaggaattcataacattgaacaacctctcgtgtacaattgggtgggtctgtagttggctctgtgcagttagtgcctggtatctgtttgctgcattaacacaaacagatgccaagtatttcagcatttatacaattataattgtataaattacacacaggatctgcacctaagaagtgattaatagattaatgaatttagcatttttcttaagagaagtgtgtgcaaaaagtcagtaccacaaaccatatatttttttcacccaaagaatgatagacacttccatttaaaatttcagcccaactgttttagccacataggtgatgtctgtggcatgatattcattgatattggcgtttggaaacagttaatagtcacacttaattacttcatggaaaatgtttgttttggagatgatattaaaggagaggcataaatgaaattaagatgggtatttttgagcacctaattccaggaagtactacgctaatcattctccgatagttttatgataagagattaaaactgaggaagacagtgggccacagatggcactagcagaagtttatgtaccctaaaccaacacatggttgggcagcattgtcattatgatgttcaagggactgccatttccaaagtcataaatataagcgtgtagttggagacaggttttggttgagaaaaatgtgacgcatagatagcagccagcctccaataaatctgggatgatttcacggaagaaatagaacttctctggggcattgttcctcagcagatcagggggtgggtgctccaaggcccgctgccttggaagaggctgaaagtgaagggtggatctggccctgccagctcagttgaggcgtaggatttcagtggcaagtaaagctgtattacaagagaagaaaagtttaggatttggaaagtctatccccagcacagcatcttaattaaaggaaagagtaaggaaaagcagagagtaaagtggctgtgagtgcagtaaagaagcagaactggggaaaggagagcaagggaggaaacagtgattgataacgggaggacgaggagcctgactgtgatggggaaggccaggtggagccatgaaacctggaaggagaagctttaaaaatttcaccgcaggaaattacaggcctgttgagaaactttactacgtatggcatcaaaacagagtaagactgaccatgaaaaaagatcctttaacatagtaactcggaattttgcctttttatgattaatgtgggaaaagtaattcttagaaataaaaggaaatggagggaatatcaacatatgaattttattttgtgctctttttctgaatgctaaatcgtttaaaatgaatccttaataagaaaaaggaataagcctttgtctggaatgtaaagaaagaaagaatttttccactattcaaatagaattaaatattgcattggggcattgtaatagttttctataatataaactaattgattctaagtgagattttaaaatctaagatgagcatgattttggaaaatagctcattattgctgaaattgtttcgaacaggaaatataaaatcaagaagcaactttaaataattaacaaacttgtctacttggggatttatttttatttaaaaaaaaaaactaatccttttttcccctcaatgttttcagtggttcaaacttagtggaataaacctaatgaagtaatattctcatacatgatatgaaagtaaatttgattcaagcttttatgtagttcttctgacataggtcatcttagtgacagattgccacctaccagatgccattttaggccactttctcccccaaaaactttttttaaaaaaggaaagtaattctctttattcttcagtatcactatgctagagttaggagttgtccagaaagttacagtttgggtccagatggtctacagagctcacctctttgtttttaaaaattcgatagggtgaaatgagcttccaacacttaaagctccaatcatggaacatctgactcataaagcgatgtttgaagctgtattttttgtgacttctccatgttgttttactttgtttcattgagttgtttatattcattcgtgttgtatgtctcttgccttctttaagttagttcttagttgtctttccttttgatgtccttggcaccgacctggtcctccccccgaccccacaattctgtttccagttcagtagtagttacttaagggtgtctcctcccatgttccttagagcaagtgcctttctaaactttcatactagccatgtggcataagtgtctgtttagtttatctttcccaatttttgcctagagactcctcttaagctgtttactgccaaaatcaccattgcagttaattctaaagccattgtataagcccccaagcccttcagacatgtcaaggaaagtagctgtgttcattaaggacaatacttagtgctttcaattgctgacaaagggaacatgctgcatttccagcgacttcctaacagtgtcacctgtgtatacagagaaccctcaaagacctgatatgtgtatgtcagactcagaagattgcccaagaaaataactagtttgctaaatggattgtaaacaaaatgttatcagtttaacccctcacttccactcagctctagagaagaatgggggttcacttacgccctttagatgagaaactttttgaggacagcatgttctgtagcgtgaagaagacaactcgggaagtgtctaaggaatggaagacaagaaggaggggagggccagaagagaaaccacaggagcccccttctcagtcaccgccagttaggctccttcagacaaccctgtgacttgctttataaggtatgtcgaaacaaatgaacctagatcattttgagtaattccatgtcatccacacacattggcctcccagtgttacaggaaagaggtcccgatccagacccaagagagggttcttggatcttgcacaagaaagaattcagggcgagtccatagagtaaagtgaaagcaagttttttaagaaagtagaggaataaaagaatgactattccataggcagagctggtgggagtgtagcagtgagaatgaacagaggtcgtacctgtcaccatcttggtttggtgggttttggctggcttctttattgcaacctgttttatcagcaaggtctttatgacctgtattttgtgccaaccttgtatctcatcctgtgacttagaatgccttaattgtctgggaatgcaagcccagtaggtctcagcttcattttacccagcccctattcaagatggagttgctgtggttcaaacgcctctgacaaccagtacctcaggctctcaactctctgaagcacagttcctgccttcccatcgccccagcaccttccactcactctgtctccactcacgtccatcaccacttccccaggcacaggagcttaaaaccatcagctgccttcccactctctctccctcatccctcacatccagagcagggtcatgagtgttcactcctgcagctgtgtcgtttgtgtgtcccagcatttatagcattctaccaccggtctccttgcagatcaccatgcgatttgctcccagagggcacaagccatgtgcacacatacttggtctatggggcatgtggacggggcaggagagcagagggcatttggctctgaggacaagaatttaagtcaactcaaagaatcaggactttgtgtatcttcttttgttgtggtttattcccacaaaagcgtatcttaaactctcattctctgctagtgactctttttgagaaatgctttatcgagcacctgggacaatatctccagtggtgtcactaattgaaggtggctactgagagggacagcaggaggctctcttggccactggccttgaccttagaagttcagggctgtaacctaaacatgctaaactttattaaatatgccagccaggatctttggttacaatgaaggaaaaaaatggacgttacttaataaacagaaaaagaatgcatagacagttatcatgcaatccatagaatatatgaaaaagccgaagaaccaggctgagaaagctggtagaagccaaggaggctacttcggaccacctgatcaagacccaaccctagcactgccaccactggatgtgcacctctgctggcgatggattctggactccaccctccaagtaatctttgaggtggccagtgctggcaggcgcatctgatggacaagcccaggtctcccactgtgcaccagctgtttcctttctgcagtggttcttcaagcagatttatgcaaacagccccaaatgtgttttaggacagtcctggcgatacccacattctcctgcaaataataggaggaaaatgtctttttcatttggcttccataggggaaagagttaggaggaaaatcctagactttttcttgaatatcttctcccagtgagaagacatatttgcctaactcaatcgataattgattaagtttaagaaattaaacttttttgaaaattcagtaatgcacacagacaaagcaagagtttttcccgtgagaaaaataaggcagacctgagcttgatacactttaaaaaggtaggtggtgaagaagaggtggcctcctagacaaagccacagcggcgtaggcctgtccatggagtggcctgtccatggggtactgttttgggcacagtgacagcaaggaataatcagttatcagataatcctaagatcagaaattgactacatgtaatcatacataattcgtcagtgtctaaagcaatttgaataacaattttcctttccctcacgcttccaagaaaatccagcggctaatccatagatggctatctcttggcaaactttgctttttgtgaagtagccacatgtcccatcagattaaaaagtgtaatttctttgttttcacaggatactgtccagtcaggaacaacaaaaaaaaaaaaaaaaaaggaagaggggaaaaatgtgattagtattatgtcattttattaatgaaggcactggtagtttcacacttaagtaaatcagttattacaagcaaggaaagttgctctccagccataatcctgacaggcctcaggggtattgaaaggttccagatgacttttgtttttgcagcagaatttaggcattgtgaacttctttctagaacacaggtcagttcatataaatctgctggaagaacctttacaataaggaaatggtattgataagctaccatttttccattcccaggagctactatttattgttacaagttacgttcccctaaatgaaaaaggcaacctcacctatcccttcatgcccccaaagctattcagcataagttaatcttttcaacagaagcagccaacttttctagcaaaggaatttgcagtctttgtggtttgggtaaaaaggtggctcattttaccagtttcttgatgaaatatgtttcatgataaattcaatctttcctcagaaaaattccccaaatctacttttctgtgcaaaattcagcatgaaagcctttctctgttgaagcagccaaagattgagtttgtgtagacctgggcaaacagtttcaggtccaaggttaaggatatttattgctggaggtattacatgtattcgtatccaggaagaacaaaattcaacaccttgacactggttttcaaatatattaatttactttcttttgtttggggggcatttttttttctccctgccctccttttaatccttttccacacttggtagaatgtggaaggatttttgccaggggtaactagcaaagctatacaatgtgttaatacacaggagatctgctggtttcttgcacagacttcagagaaagctgcttgcactctgactttggcataacatgcaggaaattcctcattggtctgcccaatgcaataaacagacctcctgcatctaaccacatccatgctgaagtttctcatgtggggttgcttttgctttttctgtaaaagttaagggtcccagcattcccattccacactttctttagctccttggctttggaatttgtgtaggactgtgcttgagagttaataggacttgtggctttattttttaatgttcgttatgtatacaaaaaggatagactaggtaaacgtgtcctccatggagagagagagagagaaagagagagagagagagaaagagagagagagaatagatgctcttgatataccttacagcttgataagaaagccagaagtcaccatttgcctgtgggtactctttagggacattgcttgctctattcactgcaggtgtttccctcagtaacccctgctactcaaagtgtggtccccaaggcagcaacatcagcctcatcagagggcttgtagaaatgctgagtctcaggccccagcccagaactactggactagagtctacattttaactaagccccaggtaattcaaagaacctaaaaggcagagaggtcctgggtgatacgccatgccaccagagtgcctgagtccatttcagtaaggacgccatgggagggtgtgaggggaaagcaggctgaccactggggcaaagagaaaaaagagcctggaaggactcgcctgagttcaattatgctcattaattcaatttgaggcaggaatgtgtgtaaataaacgctggcagctgcagcggctctgtttcccgcagggctcaggcaggaatgcaggggccattggacgtaaaaacctgactcggcattgggtggatgtttctgcaaccacgagataatgacggaaaagatggtattatcattatcgtattaggaaagtcttaatgcagagttaagtgccaaaccaagtggaactggagaggctgtgttagcatagataaaatcttcattatttgaaaagattaagcttacttgactgctccctcttctattttttaagtcaatacagatcggatttccagggggttacaatgagtaggacagcgccatggtcagacgcagcctgtcagtgtttccaagtaaataacctgttcgcatccactttttctcatacaaaaaagactaagttcgtgagaaacaggaaagagaaaattgaattatgtaggttaagaacaactccattgtaccataaacctgtgatatgtttattgtttaatttttggctcacagtgtgttcattcattgttttgagggctaggcagtgatcaccagttagccagttaatgtttgttaaaccccatgcggcatgctgggcaaagacacttgctcacttaaccattggaagatggctcttgtttgtactgtcatttttagaagctcattgaatattatgaattctaaagagatgtctgttttgcagcttaaaaattagccacaaatcccaagcgtctactcactgatggaggggcgctataaatgaagagagttgtgttcttcttaaactgggcatgttgtccttaaagcccctgtgcctgagatgatgatgatgatgatgatgatgatgatgatgatgatgatgatggtgatggtgatgatggtgatggtgatgatgatggcagcagctacccacaagctgggcactttattcaagctatatatatttaattcacactgtacctattctctatgagaaaccgaaaccaagtcctagtgaagttaacagccctgctcaagatcacacagccaggagtggggctgggctctgacctcaggctgtctccagggcttctaacagcagccattcaccctcagctcccctgctgtctcactctctagctctccctctccagtgtgtggcatgctttctctgcactctcagagctcgctgcatactcttatgaaaaaatacaaattagctgggcgtggtggtgggtgcctgtaattccagtactcaggaggctgaggcaggagaattgcttgaacccaggaggcggaggttgcactgaactgaaattgcaccttgcactccagcctgggcaacaagagtgaaactccatctcaaaaaaaggaaaaaaaggagaaaatacttgtgttatgattacaaactggggtgtgtgcaagtctctcacccactggactgtcaggagttttagagacgggactggcatggaataagccctaggttcacagcaattccttcctccttcatgcggacaggcccgtgtcttcactcctgtgccttgcactggtcctgtgggatgactagagagacagtctggcattgccaacatgtagtggacatctggggaagagtggagaacgcttgtcccctggcttctcccagcttcttgtcacagccagagaaagacctcccctatcagccactgcaggtaaaaccagagaaaacctcaccacctcccagtctgctgcactgcctgaagcatgtgtggatgttgatgtggcctgcgtgtgcaagtcagggtcatgcaggaaaaccttgcaagttcctgagaccttgagcgaccttcttggtggagacactgcttttaccttaggagaggtgatttaaaatctggctgagaatgacaggaagcagagcaaggagtatgggtctctggttattttatcccttttgtgcacatggccttttccctttaggagaaatggagttcagggggccagaaagatgagaaatggggttcttcagacttacctgtctaggccaccctcagtgttactcccttgtaccgacatggtgggagaatggttaatggaaggacagtggggcctttcactcctgcctcctgaacctccacctttgggagggtcagtggcccttagcaaaccaggacaagttggagttacatgggtctctgttcccttctccatcacagcagctttgggaaggattcaacaagtttatgtcagtccttggggattggggatgatggctgcacagtgttggaggaaggaaatcatgtcgggacctcattccctgccactcaccacccacacgccccactcccaagtattcaagggccaatttgtttgtggataaagcagatcccccgcttctgctcccacttctcgcgggtgccttctagcttcctttgctcattagcaggctcttagaaggcaggctgcagaaggaggcaagagatcactccaaaatcagaagtgctttggctggcacttcccagcagcttccttgggaagatagaggatgttgtgatcgcctggtctgggacagtgatgagctttctccctcctgatcctctgtcagatgcaggcagtccccgctgctctgagctcttcaactgttactctaaccttggcctgagactctcctaagcatgctttgaaaagtaaaattcgtgagaatggggcccaaacatgagagcacctgggtgaacagagtttgatttcattgcccctgcggcttctcctgccccactcaggcacttgccctcctcccacgagccatcccagatccctggggcccttctgcatcacctctgacgagtccactcttgtcccctctcctggcctctgccgactgttgactctgcagggaacacaggaactctctacagagatgtaaggggcttgatgctgtgcccttgcctgcatggccttcctgttactttgtggcagggcccactatcctgagctggcctccatgtcctggtctgcccagggctcgcttcctctctccagcctgagagtcagtctcctttctccgcttgcttttttttttttttttttttttttgaggtggagtcttgctcttgtcacccaggctggagtgcagtggtgcgatcttagctcactgcaacctccgcctcctgggttcaagcaattctcttgcctcagtaccccaagtagctgggactacaggtgcccaccagcatgcctggctaatttttgtatcattagtagagatggcgtttcaccatgttggccaggctggtctcgaactcctgacctcaggtgatccatctgcctcggcctcccaaagtgctgggattacaggcatgagccaccgcaccaagcccgcttgcttcttttctctaatgtctcttttcctgaccctggccctctctccttcttttggggtggctggcatgcttctcacagaggccatcgtaaaggctggggaggagggctggagcctgctggggtaatagtgcctgtcctgcccagctcatctgcagagcccccggggttggcgactgcagcagtctcagcacatcagtcccgaaccagagaaattgcagtgtcctgctgtttttcattatgctattttcttcctatttattctatggtcttgtttctcttagaattaaacaatcagaaactgatatgaggggaattcaatcagagcagggtatttgtggagccagggcatttctcctctttgacacagccacatggcttgttttcatgcattactccttaataatgtgtttatttatctagactcacacgattctctcttgccctgggtaatccactattaaccgttaataaccaggatccctagtgaaggaagggatttttcaaagaaaagcaaagggaattgcaggtttgaaattctagagagaatttcggtgggggtgagaatacaccctcactgaagagaatgtgggaaaataactgagagtgctcttcaagaggcagatgttgtacttctgctgatgctccactgtattcaagctgcattttgtttgaaagaagcttttcctccaagaatattacagtagttagttctgaaattgacaagcaatgttatatcacgtcttggataaagtatatatatttatgtatctgtaactaatgaatactgacattaagctttccaaattacttaataggacacctgtccctcccaaaagaaaagttggaatgtcggggtggtgatggtggaatagcgtatttgttgctgggatgaggtcataaagctaacttaactcttgttctgaaagagtctcagtgtggaaacggtggcacttgccctggctgggtttgactgtgtgagttttgtgttttgtaattagaagggaggtgtgcctctgctttatggacaatgcctggcaaatgctgccctccctatttttgtcgcatctgcaagtgtggtatgcatcttgtaaacaggtcactaattccaggctaggggctggaaggcagctataatctcgctcacgtggtttcacccgctccatgtgcgctggatgccgacagcacgaggggaagcctctgagagcgcggcttcgtggggcagagcatctcccaggcccactccatggaaatctcttccaagtggcagcccagagcctcttcgtgccatctgatagctgttccatagcgtataggaaaacagctgagactcagggccttctccagagggagcgccagagattactgccaggagagtgggaaatggtgagaaaaacatgaggtggcttccactctgcaagcccttagtactacataggctttatttacatggtattgctggttgctcattgtagggtcaaatttatgaagaaaggggtaatcagctcaggcacattgacaacagctggtctgctagctgacccagaacacttttccatataccagccaacaatgcataatgtctaagtaggctctataaacatccatgctgtgtgactcatttgtgtaaagttccagagcttgcaaaactaatttatggtgttggaggtcaggagcgtgggtatgcctgggtggaacagaggatgagtaagaaatggaagaggtgtgaggaggcttctgctaagtgtctggggttttttcaaatctaagttctgtccatgggtattcattttgtgaaaatggaaagtcacttgagatgcacacatgtgatctgtgcactttatgtatgaatattctacttctataaaaagtttacactaaaggtatgacatcagatcataaggaaaaacttccttcctcagtccaactctttttttttttaagacagagttttgctgttgttgcccagactgaagtgcagtggcgcgatcttggctcactgaaacctctgcctcctgggttcaagcgattctcttgcctcagcctctcaagtagctgggattacaggcgtcggccaccatgcccggctaatttttgtgtttttagtagagacgggtttcaccatcttggccaggctggtcttgagctcctgacttcgtgatcttcccgcctcggcctcccaaagtgttgggattacaggcgtgagccacagcgccaggcccctcagtccaacttttattattaataaattcagacaagagaggaaaggaagacaacaaatgttaatactatgtgtcttctacatgcaggccctgagccaggtgctttctttacatccaccctgtgagccatttagcttttaatcacttcttattaagttttgatttgtctattgaggattcccagtttgtttgtgtttttttttagtttgattcttttaacagaccaatgatcatatcaatatgtttttgaatctcaatggaatacttttgaataaatgcttctgtgggctgcttatccaatgaataatctagaaattcatttcaacacactaacatggatatcaccaccatttgagtgacttttgaggtcgtggaagttgatggcactgcccatggagagtaggcaaggaggcagaaaggaaagaacccagaccccccccccgccccacccccagagaacactggcatttgcaggacgaataaacagccttctgcttaacaagggtagcacagcacaggccagctagacagaggttcatgatcgctctgtaaggatgcttggataattcaatcttgttttcactttataaaagtgaaatagctttgggctgttgtgaaattctctgtctgaaattttaggttaggacccaaacaataacctgatgtgaatttagtagcactgcacttgtcctccttaaacaactttatctaaaagatgcctataaatattttgtataaaacttccggaattggctgataaggggactttcctttttcttctgcgtcaagttcagaaaaagctaaaagcaaaaaaggaagcaaccaaatatgggcagtatgcagtaactaatgaagtgagtgatgtggcttggaatatacaatgtgctcaaatgttttaccgctgggttcaacccagttagtatatagaagtttgtagagttcagccgggtgtggtggctcacacctgtaatcccagcattttgggaggccaaggtgggctatcacctgaggtcaggagttagagaccagcctgaccaacatggagaaaccccatctctactaaaaattcaaaattagccaagcatggtggcgcatgtctgtaattccagctacttgggaggctgaggcagcagaatcatttgaacctgggaggcggaggttgcgatgagtcaagatcgcaccattgcgctccagcctgggcgacaagacggaaactcttgtctcaagaaataaaactgtagagttcatggggtcatttgtatagaaggaaattttattgaaatcactagttttttttcttttatgtatgtgaaaatactatttctgaagttctcttctcttcgtcacctaaatatggcaattttttcctacaatctgtcaacgactatgccaagaagcaaacaatgtgagttctaccacataagagaaacttcctttatacattctccacaaaagatttcaatgttatttcgtataccatcttcagacagtaatttatttgttttactatttttgctgttgttgcttcaggcctgatcattttccccatttcctaataggaaccaatttcctgttaattgctattaaatttgtttgctcatcctttgtcatatatatatatatatatatatatatataaaatttaaatgattttaaaaaataatatatggtcaaaaatccttgtattgaaaggattgaaaatcccctaggtgaaggtttgtattaatactttttgtttaaatcaccttcttttttatctatttctgagctatagaactcttgaagaaataatttcactgttcttaagaaaaactcagagatgtggtttggtcataaccctattcacacttgcttgaggcccattggtggattaatgctctccttaagaagcatgattatctgaggcttggtataggttttcaggcaccttagctcttttcctgttagatgtcagtatcatggctgcatcctccttccccagtgcatgaccactccttgaccttcacggtggtcagtctccagcagcacttacctcctgcctatttgttccttctagaaattcttgctgttttttgcttctgaagcataattccttcctagctcccttgactgtgactttgccactatttcattgcttcattctcctccatggcccattccttaaatgtaattggtctgaaggttttttttcctcagatacttttttaaattttttaacactttttaaactttaaaaacaaatttggccgggcgcggtggttcacgcctgtaatcccagcactttggaaggccaacgcaggcagatcacgaggttaggagatcgagaccatcctggctgacatggtgaaaccctgtctctaataaaaatacaaaaaattagccaggcgtggtggcacgtgcctgtaatcccagctgctcaggaggctgaggtaggagaatcacttgaacctgggaggtggaggttgcagtgagccgagatcgctccactgccctccagcctgggtgacggcgcgagactctgtctcaaaaaaaagaaaagaaaaaaaattttaccgtctctctgggttacattatatataccaaggtttcaattccagctgaaaactagcagcttccaaatatatatctttagcacaacactttatagttgctaacaactcagtttcctttgaaagtggagacagatctttttcatcttttgtatctctttaaatacctaacagaacgcctggtacacaaatattagatagaagaaaaatgtacatcagttaaaagttcttaatttctatatcaattttagaattgtgttctaatgaaatatattgtactagaagatgtactggaagcatgaacgtagatatttccttccctgatacgtatttgtacttctgtcttcatgaccagcagaccagcctcacaattagtccatttgtaactaaagtctctatcagacagaagtgcatactggggttttagatgacattttacacaataattgttttcttcatttttctgggacagactgattttgagcataagtctgtgtagtagaaatacgaaaatatttgggaattcttttttctttagtgggagccttttattgctagaaatgaatatcccatagagctaaagaaagacctatgaaatttagcttttaaaaacaaagctgtgtttaagttctttggaaacagaaggtattgcttaaaaatgacacagcagatgttatgaaatttgttttaaagcattactctcaggttaagtcatgtttgccaagttacaacccagaacacgtttttacaactcagcagtgctctgaaattgagggtctgtgatgataaaagggtactcatgttgtgcagtggaccacgagtgctctgtcaagctgtgggtgaggaaatgaacctcacatcaccttagaagagtcgagcatctcttcctgagttgactgagtgaagccaaagtaaagttgaaaatgcaagctacattgtcccctaagatttacttttgttttaatagatgctgtgtgttgctctcactcagttttggagttatctgtgggttttcttcaatgtgtatttgatgtttctttagggcaaagttacgccactcgaaaacgatcgtgttgaaagtgtgtcatattcagaatgggatagaaatcaggttgcttgttagacctgagccttttgttttgttttgttttgtttgagacacagtctcgctctgtcgcccaggctggagtgcaatggtgcgatctcggctcactgcaacctccccctcccaggttcaagcaattctcccacctcagcctcccaaacagctgggattacaggcacccaccatcatgcccgcctgatttttgtatttttggtagagacggggtttcaccaggttggccaggctggtctcgaactccctgacctcaggtgatctgcctaccttggcctcccaaagtgctgcgattacaggtgcgagccactgtgcccggccagatctgagccatttgatccctgccttcatccctattaactgataatttatctattcattagggggctctgtgaggtgggttctgactgatgttggaggggatgcgctataattcctgcctctgcatttaagtgtatgagtgtttcaccagggatgtccaaactgtcccactttgggtaaaggacaaaaagcaggccaaacaagattttcttttgtctgacacaatttaaaaaaatattgcaaggtaaaatatttaacagaatgattgtactgggttggtagtgtgtgcgtgtgtgtggtttgcttgattttgaggcttcataatcttttaaaaagatggagatgtatgaccttcaaagcctttttctttttttttttttggagatggagtctggctctgttgcccaggctggagtgcaggggcgcgatcttggctcactgcaagctccacctcccattctcctgcctcagcctcccgagtaactgggactacaggcgcccgccaccacacctggctaatcttttgtacttttttagtagaggtgaggtttcactgtgttagccaggatggtcttgatctcctgacctcatgatccacccgcctcagcctccaaagtgctgggattacaggtgtgagccactgcgcctggcacctttttctcatttttattagtaggtagtgtcagcttgggttcttactgtgcacagcctatcttggcacagggtggcatctctttagttatgagacattcaatttggctttatgggtggaatttacttgatgcctgtgaaaaataagttaaaaggcaatggaaacaacaaatggaaacatttctctctctctctgtctctctgtctctctctctctctctctctctctccttccacctgtgttatgcagatgtactgggaatgaaaaataagtcaaaaggcaatggaaacaacaaatggaaacacctctctctctctctctctctccctcctcctctccttcccctttcttccacctgtgtcatgcaggtgtactgggacacagcatacagtgcgatgctctcctttgtgcctgggagatgctccctccatccccctcctctgccatagcctatttgatgacgtctgtgactgtatggggccacagtttgggtctcaactttgtgtgaagcacagacttttttttagtctgttttttttttttcgcatcaaaatgaggaccaaatatttgatgactcctgatagaaaatattcttcaaagaatacccagggctgaaaacattaaaagttagcacaaagtgttaagtggttggtaatattagtattagataggctcaggtttgggactgtttctatcaaacataggacatatcaatcaaatgttgttgtagcgtaagtccagagaagatttttttttcttttagaaaattttcttttttttattattattatacttttaagttttagggtacatgtgcacaacgtgcaggtttgttacatatgtatacatgtgccatattggtgtgctgcacccattaactcgtcatttagcattaggtatatctcctaatgctatccctcccccctccccccaccccacaacagtccccggagtgtgatgttccccttcctgtgtccatgtgttctcattgttcaattcccacctatgagtgagaacatgcggtgtttggttttttgtccttgtggtagtttgctgagaatgatggtttccagcttcatccatgtccctacaaaggacatgaactcatcattttttatggctgcatagtattccatggtgtatatgtgccacattttcttaatccagtctatcattgtgggacatttgggttggttccaagtctttgctattgtgaatagtgccacaataaacatacgtgtgcatgtgtctttatagcagcatgatttataatcctttgggtatatacccagtaatgggatggctgggtcaaatggtatttctagttctagatccctgaggaatcgccacaccaacttccacaatggttgaactagtttacagtcccgccaacagtgtaaaagtgttcctatttctccacatcctctccagcacctgttgtttcctgacttttgaatgatcaccattctaactggtgtgagatggtatctcattgtggttttgatttgcatttctctgatggccagtgatgatgagcattttttcatgtgttttttggctgcataaatgtcttcttttgagaagtgtctgttcatatcctttgcccactttttgatggggttgtttgttcttttcttgtaaatttgtttgagttcattgtagattctggatgagtatgttgcaaaaagtttctcccattctgtaggatgcctgttcactctgatggtggtttcttttgctgtgcagaagctctttagtttaattagatcccatttgtcaactttggcttttgttaccattgcttttggtgttttagacatgaagtccttgcccatgcctatgtcccgaatggtattgcctaggttttcttctagggtttttatggttttaggtctaacatgtaagtctttaatccatcttgaattaatttttgtataaggtgtaaggaagggatccagtttcagctttctacatatggctagccagttttcccagcaccatttattaaatagggaatcctttccccatttcttctttttgtcaggtttatcaaagatcagatagttgtagatatgcagcattatttctgagggctctgttctgttccattgatctatatttctgttttggtaccagtaccattgctgttttggttactgtagccttgtagtatagtttgaagtcaggtagcatgatgcctccagctttgttcttttggcttaggattgacttggcaatatgggctcttttttggttccatatgaactttaaagtagttttttccaattctgtgaagaaagtcattggtagcttgatggggatggcattgaatctataaattaccttgggcagtgcggccattttcatgatattgattcttcctacccatgagcatggaatgttctccatttctttgtatcctcttttatttccttgagcagtggtttgtagttctccttgaagaggtccttcacatcccttgtaagttggattcctaggtattttattctcttcgaagcaattgtgaatgggagttcactcatgatttggctctctgtttgtctgttattggtgtataagaatgcttgtgatttttgcacattgattttgtatcctgagactttgctgaagttgcttatcagcttaaggagattttgggctgagacaatggggttttctagatatacaatcatgtcatctgcaaacagggagaatttgacttcctcttttcctaattgaatgccctttattcccttctcctgcctgattgccctggccagaacttccaacactatgttgaataggagtggtgagagagggcatccctgtcttgtgccatttttcaaaaagaatgcttccagtttttgtccattcagtatgatattggctgtgggtttgtcatagatagctcttattattttgagatatgtcccatcaatacctaatttattgagagtttttagcatgaaggttgttgaattttgtcaaaggccttttctgcatctattgagataatcatgtggtttttgtctttggttctgtttatatgctggattatgttattgattttcgtatgttgaaccagccttgcatcccaggaatgaagcccacttgatcatggtggataagctttttgatgtgttgctggattcggtttgccagtattttattgaggatttttgcatcaatgttcatcaaggatattggtctaaaattctctttttttgttgtgtctctgcccggctttggtatcaggatgatgctggcctcataaaatgagttagggaggattccctctttttctattgattggaatagtttcagaaggaatggtaccagctcctccttgtacctctggtagaattcggctgtgaatccatctggtcctggactttttttggttggtaagctattaattattgcctcaatttcagagcctgttattggtctattcagagattcaacttattcctggtttagtcttgggagagggtatgtatcgaggaatttatccatttcttctagattttctagtttatttgcatagaggtgtttatagtattctctgatggtagtttgtatttctgtgagatcggtggtgatatcccctttgtcattttttattgcatccatttgattcttctctctcttcttctttattagtcttgctagcggtctatcaattttgttgatcttttcaaaaaaccagctcctggattcattgattttttgaagggttttttgtgtctctatttccttcagttctgctctgatcttagttatttcttgccttatgctagcttttgaatgtgttttccttgcttctctagttcttttaattgtaatgttagggtgtcaattttagatctttcctgctttctcttgtgggcatttagtgctataaatttccctctacacactactttgaatgtgtcccagagattctggtatgctctgtctttgttctcattggtttcaaagaacatctttatttctgccttcatttcgttatgtacccagtagtcattcaggagcaggttgttcagtttccatgtagttgagcggttttcagtgagtttcttaatcctgagttccagtttgattgcactgtggtgtgagagacagtttgttataatttctgttcttttacatttgctgaggagtgctttacttccaactatgtggtcaattttggaataagtgtaatgtggtgctgagaataacgtatattctgttgatttggggtggagagttctgtagatgtctattaggtctgcttggtgcagagctgagttcaattcctggatatgcttgttaaccttctgtctcgttgatctgtctaatgttgacagtggggtgttaaagtctcccattattattgtgtgggagtctaagtctctttgtagttctctaaggacttgctttatgaatctgggtgctcctgtattgggtgcatatatatttaggatagttagttcttcttgttgaattgatccctttaccattatgtaatggccttctttgtctcttttgatctttgttggtttaaagtctgttttatcagagactaggattgcaacccctgcctttttttgttttccatttgcttggtagatctttctccatccctttattttgagcctatgtgtgtctctgcacgtgagatgggtttcctgaatacagcacactgatgggtcttgactctttatccaatttgccagtctgtgccttttaattggagcatttagcccatttacgtttaaggttagtattgttatgtgtgaatttgatcctgtcattatgatgttagctggttattttgctcgttagttgatgcagtttcttcctagccttgatggtctttacagtttggcatgtttttgcagtggctggtactggttgttcctttctatgtttagtgcttccttcaggagctcttttagggcaggcctggtgtgacaaaatctctcagcatttgcttgtctgtaaagtattttatttctccttcacttacgaagcttagtttggctggatatgaaattctgggttgaaaattcttttctttaagaatgttgaatattggcccccactctcttctggcttgtagagtttctgccgagacatcagctgttagtctgatgggcttccctttgtgggcaacccgacctttctctctggctgcccttaacattttttccttcatttcaacttttggtgaatgtgacaattatgtgtcttgaagttgctcttctcaaggagtatctttgtggcgttctctgtatttcctgaatttgaatgttggcctgccttgctggatttggggaagttctcctggataatatcctgcagagtgttttccaacttagttccattctccccgtcactttcaggtccaccaattagacatagatttggtcttttcacatagtcccatatttcttggaggctttgttcgtttctttttattcttttttctctaaacttctcttcacgcttcatttcattcatttcatcttccatcgctgataccctttcctccagttgattgcatcggttactgaggcttgtgcattcatcgcgtagttcttgtgccgtggttttcagctccatcagctccttcaaggacttctctgcattgattattttagttatccattcgtctaattttttttcaaagtttttaacttctttgccattggttcaaacttcctcctttagctcggagaagtttgatcttctgaagccttcctctctcaactcgtcaaagtcattctctgtccagttttgttctgttgctggtgaggagctgcattcctttggaggtgctctgatttttagagtttccagtttttctgctctgttttttccccatcttttggttttatctacctttggtctttgatgatggtgacctacagatgggattttggtgtggatgtcctttctatttgttagttttccttctaacagtcaggaccctcagctgcaggtctgttggaatttactggaggtccactccagaccctgtttgcctacgtatcagcagcggtggctgcagaacagcggatactggtgaactgctaatgctgctgtctgattgttcttctggaagttttgtctcagaggagtacccagccgtgtgaggtgtcagtccgcccctactggggggtgcctccaagttaggctactcgggggtcagggacccacttgaggaggcggtctgcctgttctcagatctcaagctgcgtgctcggagaaccactcctctcttcaaagctgtcagacagggacatttaagtctgcagaggttattgctgtcttttgtttgtctgtgccctgcccccagaggtggagcctacagaggcaggcaggcctccttgagctgtggtgggctccacccagttccagcttcccagctggccaccttgtttacctactcaagcctgagcaatggtgggcgcccctccaccagcctcgctgccgccttgcagtttgatctcagactactgtactagcaatgaacgaggctccgtgggcatagaaccctccgagctaggtgccggatataatctcctggtgtgccatttgtgaagcccgttggaaaagcgcagtattagggtgggagtgacccgattttccaggtgctgtttgtcacccctttctttgactaggaaagggaattccttgaccccttgcgcttcccgggtgaggttatgccttgccctgcttcagctcacgcatggtgccctgcacccactgtcttgcacccactgtccggcactcccctgtgagatgaacccagtacctcagttggaaatgcagaaatcacccgtcttctgtgtcgctcactctgggaactgtagactggagctgttcctattcggccatgttggctccaccccaagtccagagaagcttattgctggcgagcgtggaaacatgcatgcatgggtttctgtctgagtgctggagctctgtagagcaagggcagcttgggatggcctgccagtatgccctggcaattctgtgttacaggtgctgtcctttctgctccttgtggtgtgacatgccacaactcatttaaccccctgcctgggtatgtctgacaaattgagaatatagaacctgatttatctagagttttgccagataatgcatacgggtgtctggtatactctcctgaaaatatactatggttatacagagaattacaatagcaagtgactgggtacttcctgcagatggcagggataatagaggcctcccaggagggccactatctcgactgagattgagatctgagtgaggagcagagccggtggtgtccgcaccaggggaggcaaagctgagcggaggacacagagcatggtgtgttctgaggacagggccacagtcagacaggcaggaaggaaggggttggtgcaggggagggtgcaggaagaagagcagaggggtgcacggtagccagaccacggaggtctttgtaaaggacagagcaagaaacttgattttcctgcagatgggatggagagtctttggagagctttaataggaaaatgacatgctctgatgtctatttccaaagctcaccctgcctctctatggggaaaaaataggtggtacaggggaaagagtggaggcagggagtccagctgggtgatggggacttggagttgggagtcaggtggacatgaggcacacagctgtgttcgaggatgctgggacctgcccagggactggagtagaagctgtcaactgaagaataaccaggatcatacatttggaagagctttatttctcataaagggttatagcctgcaggctggccattcctcctgctgggaggcagagctgagagggagggaggataagacaggaatttatgctgaaatttctgggtggctggaaatacatatttaatgagctataggaggagtcatgaatatttatgagaggagaaacatgtacaggcacaattgagttccatgcctcttcatggattacatgttcaaaaaatggcagtgttagcatgatctgaggtggagttttcagccctctgacatgaaaaggtgcagtggaggacaccagaacctcactgcatcctctgagagtcagccaaaacgtgtcccaaggtggtcgtcagtgtttacgaagggatgtgttgtgagacaggtgggctgtcacgtggaagaagtgaagagggaggggcatctggtcgcagtttcagatgattggctaaggtgataaaggaatgagttgtccatttctcattttccagagctgatttctgcttactccttagaaagagttttggctaaaggttaataaggaaggggcacactgaggcgtgttcaaccttatgtctgatgtggtcaaaaactccgtttttaaggtttctccaaggtctccttggccaagagggggtctgttcagttgcttgggggcttaagattttatttttatttctcaaagacctgggagagagaagtgtccaaggcacctgctagagttttacctaagcaaaggggtgggaaggtattagcgctgttgactaagatggaaaacacgggagaagaggggcttgtggagaaaccacacctccattctagccacgtccactgcgaatgcaggtgacacatggaagcagcaggaacacccctgagcatcttcatggagtttggatcaagatggaagaaaagcccatgcgttgtctaaggctgcctcatctcagaagccaatgggcggtgtaattagtgctgaaaggtgggctgggggatgactgcattgctctagcaaggaaggaggagcagggagctgaagggagacaggtggaggaggccaagcaactggctaagcccatgagggctaagggaggcctaaaatgcgggacattggagaggaaatgttctggaagcttctacaggcaaactgcattgtactggaaggggccgatgaatagtgctgggtcaagggtttttaagtggaattgagaataagggaagcagaaaggtggtttgaagaggcgaaaaaaggaaaatggactgaaccgaaagggccttgggagtgttatgggattggagaacttttcctaaataatttaggagctccagtagaatttatgtttatgtgaaagaaaaaaaaaaaaccacatgttacttagaattgggaagttttgtgcacccatgtctaggaattaaattttatatgaattcatatattatatattatatatacataatttaaattgtgatttttaagaagaaatcaaatcaaccagcaagggcaaaataaaaattttaattatctatttgtttttccattatttttatacacaaatcttagaagcaggaacagagtagtttcaaaggccagtttctgagacatgcttaaaattggcgctgataacaaagaaactactatgaatggctgaggtttcaaagttagattagagttcactctagatcgtatttgctaagctagtaaagccgtgtaggcttgttctagcctgttggctgggaaactatctctaaacaggatgtggtgattatttgtgaatgatcattactcattctgacaacagatcctcactgcatgcccaaggggacatccccttttaaacatgcgtataaagatgactcaagtacgaatatcatatgtacagcgtatcaatattagctgacctaccaaatctgaaaatgcttaagtaaagataatacacaataatctagttatattaagctatattcgggatccattaagtagcctcatagttatagaaaaggataacaaaaaaattttttggcaatctagtggaataggggtatggggtttaaaaaggacaatgaaaaagttcactgagcaggaaaggaatggaagattgctcaacagatctacaggaaaccattcccccgccatcacctctgcatttcaaaaagcaaatgcaattccggtcagaagacattgtctacttcggagtgatatgcttataatctatctgtgtgtgttttttaactcttacagtgaagcttcaattatatcttcttaaccccttcccaaagccttgggaaacactggacatttttctatataagcagattgggttatttgtccaaatgacgggtgtttttgaactaggacatctagcttctatccataggaaaccccatatctggtgggcaaagaatagagtataaatattatgtatctgatatttacactttgggccataagtgtttgaaacagttatatctattcatgtgaaatttctgttcacattatagcaacaacatcaatttaaaaaaaaaaaaacaaaaaagaattccccaagactgtccattctgcgtgtgtgtatgcacgtgtgtgtgcatgtgcaggcattttgcaccatgctgcaaaacagctcctcttcctacatttgcccttgactgttcatctcccaagactcaggtcttcattctcctctgcacgttcctgtgctttcaacccgtcttatagtgaccccaattctatgtgttcagcccagacctcttcctgaaccacaggcccacgctggttgagtgaatttccagttttcagtacgacatttcctcctaaatgtctgtggtctttcggtccctgaaaatcaactgtcaaactattaactgactttatacatcctcagcatgcacacacacacacacacacacacacacacacacgtaaatgcacatggcaggggttggggcacaaagtagataaaaactcctgtctcgaatcacttgaacctgggaggcggaggttgcagtgagccaagaccatgccgttgcactctagcctgggcaagaagaacgaaactccgtctcaaaaacaaaacaaaacgaaacaaaacaaaaaaaattccggtctcctgccatagctcctgtcttggtttcaggttactcatactaggaacgcagagacttattcttgacttttctctctcccacagtctccatacgcaaacagcccccagatatggctgctttaaccctgccgttgcatttgaatctttcctttccttcctgctgcccctccaccacagaccctgctaggtctgactgccatggctctcttctttcccttcacctcaatctcacatgtcacttcccactaaccccacctggtctcccatcctccatcctgtcccctctaagtctgttcttcattggaatgatcctttcagaacctgaatcactcatgtcattcattcctctgttcagaaacttgccgtggcttctggcctcattaagagagtaagtctaagtccttgcaatgatccagaccactgttgattatccctgccactgctgtccttgctcattgctctctgccacggtggtctcgttattcaacgtccctgggtagattttgtctttaggttctgaacttgctgttccctttgccctcagccctctcgaggggtcactcagatcctcagcactgccctcctcagtggaccgacatcgacaccttaccctgtttccaagtcacttttcacctctggacacactgtgggatttacttatttctttggcttgttttcccacacacattcacacaatgtataagctctatgaggctgcagtttttgtctgttctgcagttgatttctcagcttctaacaggaagtaaataagtagtttttaagtaaatgaatgtgaatcttctggggagcatttaaaaaaaaactgttgtacaaactctgcagattgaggatcccttatccacaatacttggaatcactggtgtttcggattttgattttttcagatttttgaatatttgcattggacttaccagttgatcatccctggtctgaaaacctgagatccaaagtgctctagcaagcgtttcctctgagcgtcatagcacactcaaaaagttctgggttttgaagcatttcagatttcacatttttggattcgtgatgctcaacctataccttggacctgtcaaatcagaaaccttggggagtctgatccaagagatgatactttttcaaggttccccggtaatccactgcccagctcaggctgagcgccattgctgccagacagatttcctaaaccgtggacatcatcccaccttcatgcccttcgacattctccgtttcctcatagaatcatgcccagactcaaagtgacagtcacaaacccgcacccgttgccccaggggccttttggcctcgtgtcctgcccctcaccatgcgcctcttcctgcctgccggaagcgctgttgtcttcccttgggtgtgttgctgcctcgtgccctcccttgcctttgcctgtgctgttgctctgctgaaaatactttctttccattctctgatgggtgagttgctcaaggataaagtttggattcaaatgtcagtgttatagttttccctaatgctctctctttttcctcacatctccccccggtaattaatggttgcttatataacacattgtgtgtcatatccatatcctacaccattggagttcctcattctctcatcagactctgagcacctgaaggataagaacatttcattgatttatcctcaacattcagcgaataatcacatatagttcttttaccctcagtgtctgccaaattgccaaatatggttgtttagtgtgccaaaacaaaagttatgttattgatgtgaggtatctctttatcaagtttttccgagtattcagtagtcagatacctgcatgcgcatggctgtaagcatgtgtacgccccacccccgccaccgccccgaggagaagagtgtgtgcccagcctgggcccttggtcctgaagggagagcacgtcacccattgtcatgttattatccattaacgtgacattgtatcttctctctacccagagacatcacccatcttctcctcattcctgaagacctaactttagcctctactactctctctttccgcagataacctccttaggtactttacttacttaaaaaaaaaatttttaagggatgctttctaagtgacatctcttatacactcatttctaaaacgataagtttttctcttcctctccgaatttagtttcctattatcctgatctatcacttcttaacggacactgattctgctctaagcctctttcacttatttttatatgctctctctctctctctctcttacttccctgttggtctttcagttttctggtttctcctagcattaaataaaaacaagagcagtagccgtcctgcctggtatcccgtgctatccctgtgctccctcctccacagtttcgccaacagcggttggtgcgtgttgagtttctgttcacacctccggcccctctccatgccctctgcaggccgctgccatctgggtttctctggaagtgcagaggccacaggttgcaatctactctccagcctcggtgcctgtctctgccctggttctcctctgccagctgacctcttgccttctgattcccagaaggacagggcgttggttcctgtgattttccactctcctggggccccttcctgcctctagagtggccatgcccatctcagcccttcctcgccctgagggctatcaaaccataaatgagagaacttgccagaaagcctgaggccacggaaacattccacacactgtgttttccttcccaagtcttggttatttcctctttgttctttgtctatactcctcaagcaaacctctttcttgaaatattacacttctcccaactctctctgcagttttttttctagcaccagtctatatttgcctgcatgatgaggccttaccttaaactttacatgtctaaaacacatcttttgtcttcctcatcctttttaaaataagtccttccagatttctatctttttgtcattcatcttctgactctagtgccccaagtctctgatcatctctgtattcctccccctttatttgcccttcatggccagccagtctttgcatcctttcactaccctccccgccccccgcccaatcctagcataaactttcatatcctgtattacttcctgtcttcaatctcttcttttgtattacagctacaaacttgacctttctgaaagcctgttttcattgtgtcactctgctcagaatctgcagtgatgcccttatttctcttccaggattaggtaactctacccagtcttcaagggtttccacagcatgccccaccttagcaattcccagcaccccgaggcctgagcagcggtggggtctcctgtctcctctcctctctgccttttgatgaatgctcttgttcttcctgtatgaaacgctcccccgccttctctctccccctcttgccgtatatctcctttctttctcttcttgttcttctgtgagtacatctgtcacaggcccttggttttctgtcactgcttctacttaactattgagatgacagaatgagagccttcagatgggaaatcctggtttccaatgttgcttaaagtcttaccactttattaagcaagcctaaagctcagtggcagagtccctgagtaagccatgtcttcgtctctttctccctggtgatcaactctgtacttggagcatggatccttaataagtatgttttgttaatgaacagtcaaacagatagaaaagactcacgaaactgtttattgtattccaacaaatgatagctttgaaaagaagctaacctggtggctcacgcctgtaatcccagcactttgggaggctgaagcgggcggatcacttgaggtcaggagtttgagaccagcctggtcaacatggtgaaaccccgtctctaccaaaaatgcaaaaaactagccggcgtggtagtgcacacctgtagtcccagctactccggaggctgaggcaggagaatcacttgaacctgggaggcagaggctgcggtgagtaaccactgtgctacccgtgtggagatcgcgccactgcactccagcctgggcgacagagcgagactccatgtggagatcacgccactgcactccagcttgggcaacaaagcaagactccatgtggagatcacgccagtgcactccagcctggcaggagagcgagactccatctcaaaaataaataaaaaaataaaataaaataaaataaaataaaaggagctaagttaaagttgaatgctcagttggataatcgtttactaacaattgataggagcttggcctctggtgagtttctagatgacagtggtcttagacctgtctctatcccttgctgttttcattcatacagtaaagaggtttattgactgagccactcaacaaccatttcgtaatatctatgatggggatacgttgatctttaagggtcctttcaactgtaaaacagcgttgatgacattttctgaagacaaacaaacactcaaaagccttacttcttaacaggcctgttgaagattttctttttcccatctttgccatcacaggctttctttacactccctccactccactccacccctgctttttcttgtcctaactctatgtctacaccaaggctaggcccttgtgcttttagctgccaaacaccgtatactcttaaataaaaacagtagaatttgagtaaaaagagattttcttagagttctgtgatggaccaagcatgaaatgatacagccaactctacgaggaaataggaaataggaccttgaaggttcttttcagagttaaactgtcctgttggattgcttgttcattttaagactttgacttattttagatatttttttcagataaaagttcggtgatgacaaatgaactctacagtctggcatctaccctagcagactatcaaaattgaaatgattaatataacattcgtcatttgagataaataccttagaaatctcatttaaagatagtcatgtaacgccccatggttttctaccgaggcgtgctttctttgctcctatgtctgtagggcagttttctaatgcagtggtgtcagtagttaccgtaagtcagcagtcattgtgtgcagctctagtccgagcactttaggtctgtggtaacagtgacttaggtgtgttgaacatagtttcacccttcaagttgtcttgtccagctgggattacagaggaaatgagaatttcctaattagtcagttagactgatcttggatactttcatctttgcaacgtcttgtcttacaagaaagtaatgaagccgagattgttcttcctatttagaatagaccagggtgtccacaaggcctcaggtccttccgaggtgtcttgtaacagcattccacaacagctgttctgttttaaggctcagtgcactccacaaattccagacgccccatggctgctacagttgctgaatggtgacttcaggcttcacttggttcaagcctcaagggggctgagccaaagctggcatgacttgctcttcagcaacaagttccaaatagagaaaacatttcaaataccaactgactgctgctttcttcaaaagaaactgccttcagaggagaagctcttccctgtgctcatgatcctggttccatgacttccacagcattttcatttcccagcccttctgtggtggggacagtcgatctagtgattgtgaataattttagtgtgcaatgcttaacttttacaaaacaagccaacaaagctgaaaatattatttggatgataagaggagcaaacaaccttaaggaatatttttaaagtgtggatttaaattgaatcgtaatattaaatttttaggtttggtaccatgtaccttgaacttcaaggattgttatttaccagtaatatctacatattaaatctttatttaaacctgatatcaggaggaggagggtggggagagaatggtcaatgggtacagaattccaattagaaaggaacagtaaatgctggtgttctattgcaaagtagagtgacatactagtcccccaaaatgatcttagtacctgctactctagtcaacaaggtattatatatctcaaaatacctagaggaaaggattttgtacgttcccacctcaaataaatgataaaatatttgcagtgatgaatgtgctcattagacttatttgataactacacaatgtaaatatgtaccaaaacatcacatcgtaccccataaatatgtataattatgtttcaattaaaaataactttttaaaaagctgatatattttagctgagtgtgaaagctctgcaaatacagtagagttgttgattaatttttcgtattattatgcattttaggttggtgcaaaagtcaaccgcaattacttttataccaacctaaaatacgtaatacaatatttacttccttgaaaaggaaatccttaatgcacatttaaattatgagttcccagaataatgtggctggtaaaataatacattttaaccatttttaagtgtacaattcaatggcattaagaacattcataatgttttgcaaccatcaccaccatccatttccagaaccttttcatcttcccaaacagatcccgttacacagtaattccccacaggaattcccgccgccctcccccaactcagccggttatatccactgttctacttcctgtctctgtgaatttacctattctaggaaccccatacaggtgcaatcatacaatattttcctttgtgtctggctcatttcactgactgtgttttctaggttcattatgttgtagcaggtgtgcaatttccattcctttttcaagctgaataatgctccgtcttgtattggcctattttgcctgtcccgtcatctgctgcgggatggtggtagtgttcgcgcctgtggcttttgtgaagaataccgcagtgaaaagggatgcacaagtttctgttttggcattgattaattttgaaatgtgcctcactctttttcctataataggtaatactttttgacaagaaatattaaatatttttccaaaagtggtgcagaattggcatttttgctgttttcataatggaataatacttgaatgggtataggcccttattggaagttctgggttctaggttggctggttacagatttgtgtaagtcctcatgcctcactgtaaataccatcttcacgcagtagcgagccctttcacggcacctgtaaatgattaagtcaatgtaaagagaagactcattatccctctttagataaggccaggagatttgtgagagaggtttttgcaagttctgtgcagaactgcagtatggtcaaagctgagctgttaccttatcagctgtgtgtgagccctgcaggtgttatgtggacagcagtagagagaagtcaacagattggattttttttcttaatttctgtattggaaaaacatgggacaacgggtgtctcctatatttaatttgtgcttagatgtctactagaacctgatgaaagtgtttttgttttccagttaggaaaacacgctgtttcgctcacaaggttgaatgaagatggtggtctttgcgcaatatccatgtattaatacattaataacaattgagcttataataaagaattgtgccctttcaaattatctgaactgtctgctgtatgtcacattttacctttttagagaagtgctaattcatgttaagtccgcctgagagatttgtttaatgagcagattaaatggatgattatccctctcaatttttttttttttttttaaggaagggcttcttgtgatgctcctctgttatttggcgcaggaacacagaggggtctttttaaaattacccctgcagggtcaccaggacccaagctgtttgcttcattaaaccctggtggcttctttagagccagcccctccaaacagccctgacacaattgtatctaaattagcatctgactgacccctttctctcctcttttcaagcccctgctgacagggattggcaaaagatgttaattggttgggcctggcttggaacaatagacttgccaagatgacaaaagaactaatgtttctttcaatatgcatccagattcacataagtacctcttttaattcctgggaattattgtaatgcctggtcaatgggataattgaccctcagcagctagctcttactccataatacagcatggcacaggcctatcagagtagcaggtactagggtgatttgcaggggactaaaaagagattttctcagccagcgttctgtgatgtaccaaggcagcccagtgggagtcccagagaggggactaatttgagcttaacagggggaaaatgtgctaagagccactaaaacttatcctcagaatcataaaggagttgcataaaggaatgagttaggagtttgaaagaagtgagttagtagcttggcagcttcgaactcatatggtgaaggataggacctgggcccaacaactctagacaggtggagacgccgcagaatgttgacttccacacaggaaaacacaaggtttatttccagcacataccttcgctgctcgttttatagaagaggcatttccagttcagatgttaggctaaatgagcccccaaaccttttcttatctcactctttactatcccaacttgctagaaatcttacagatcgttttgcctggtactgaggctctagaatttgttttaaaaaattaactgtggagaaaagggaacccttgtacactgtagtttggaatgtgaattaatacaaccattatggaaaactatatggaggttccttaaaaagaataactagaattgtcatatgatccaacaatcccacttctgggcatttacccaaagatttcaaatcagtatgtcaaaaagatgtttacactcccaaattaattgcaacactattcacaatagcagagttatggaatcaacctaagtgtcaatcaatggatgaatggataaagaaaatgtgagacacacacacacacacacacacacacacacacacacacacagtggaatagtcttcagccttaaaaaagagatttagtcatttgcaaaaatatggttggaattggaaaacattatgctaagtgaaataagccaagtacagaaagacaggtgctgcatgttgtcacttacatgtgaaatctaaaacaatcaaactgaaagatgcagggagtagaatggaggttatcagaggctggggatgggggatggagagatgatggtcagagggtacagagcctcagtgagacaggaggaatatgtttttttctttgagatatattatacagagtagtgaatatagtaaataataatgtatcatacacttaaaaatcactaaaagtaaatttcaaaagttctctccacaaaaagatgcgtatttgatgtgagggatatattaatttgcttgatttaattattccacattgtattcgtgaatcatggcatcactttgcaccccataaatacatgtaacttgaatctgtgaatttacaacctaaattttttttaattaactgtgtaagtatggtatagtatgcactacagagtagtcttactttgaggtttgggttgtaattccaatcaaggttaatgtttaaaactagctgtctccgacctccattacggtaacaattggcactacatggtgctgagtgggagcttcattttgtggttatgacagcccaatctgagaaggaggtgtttgtggaagcactaaatgcagcagtgcgttggtcaactgagtagcctttgaggtcagatagccctgcgtctccctcccaacttgtcacctgtgtgacttttagcaagttactatcatccctacgtgtaggttcctgctttcaaaaagggataaagagttaaaaatagcaattttctaaagaatcgcagagcaaagtgagctgatctcatgttattccatacagtgccagatatagagtagtactggataggccatctgttgtcatcattgccccaggatcgcatagccaggaaggaatagagatgcaattcacactgactgctgtttgactctgaagcctacactgtttcaggatgctgcgttggcagttcattcctaaaatttaagggaaaatatccaaacacctcaaaaatggtgaaaaaatagaaatgcttgtttccatcttttaaaagagcaagtgagaaaaaaatatatccattaaatataacaaaattcagatacatcattctgaccttctttgccagaaaattattttcctttcataaaactataatatacttttttctagtgcatgtctgccatggaaggagaccatttaagcaagatattgattgttagttctcaagtttattagtttctcacaaagaaaaaggtctgatttatacaccagagcgtggggttcatgccactgcctgaagctggtgtagagcatcctttaggcttcaagggtctcaatcagaaatcatgttgtgtttgttcagatgcttgatctggcgaataagttcagtctttagaaattaagttatcttaggttaatgtgaatcaaatttaaaaaatggtgaaaagcagcattttttgaagtgatttgagttaggaaattagtatagtgtacaaagtctttctgagcttctctgggagcagctctggtttttatcccagaaagtgtatcctttagcaggagggcttctagctgaccatggaagtcaaagttctagtccagcttcattactaagcagctctgagcccttgggtggttttgtccatcactccaggatgtttgttccctgagcagtaaaatgaagggacacaaccaggtgacctcatatgactcctcagcattagaccaaaagacactctcgtcatcatctcacttgatgtttgtgccattagatacttatggctacctctgcttcctgaaactcttctttgtggacatccaaattatttcttgcctagttccctcttatccatctctttccatctcatttgccagttcttccttccctggcttccatttaagtgtgtttttccttagagttcagcccttcctggatttcctgtgttttcctatggtatcacttccattcccatgacaatctgcaatgtgtatgtgtgtattaaatattaatataaatatcaagtataaatatccagcccttacctctttcttaagtgccagacttggcttttctaggaacctctcccactttacacctgtgtgtttacttggccacctaaacatcaacatacttgaaaataaaatctattttctacaacctgtgtactgatgagcacccttatccatctcaatgctcagaagtggaatgtggaaggtttttttatgctcttactattccctaacctacacatccatctgtttccatccctcctctccttcaccagtatgtcttcaaatccacattctcaatgctgatgtactggtgtggccctgtcatcttctgctcaactacagcagttactccaaaccataatccccttcccgccatgctttaccttatggtacacccctgtcactgcacagacaattgttaagggtcacagctacctacagagcaaaccccagtctccttagaggggcttcgcagtgctcccccatggggcttctgtctgcccgcctcagccaccctttctttaactccacctcttgactccaagcctggaaccaagccatggctttcacatgccgtgcatccctctgtggaacgcccttcttcccccttcccgatttgttaggatttggctcacctttcaagcaccaaactctcatcatttgttaaggtttcgccatgaaaggtgttactgcctgtgtggaatcttctccaaacttcctagcagaattcatctctttctgtgccgacccacagctcttaagcatttctgttctaaagtgcttctgttctaaaattatgttgcactctaccagtgcattggtccatttatcataatgttgaaacaaaaacatgaaacatttctgtgaaattcttctttatagaaatcatagaatttgtgtaattatgtacttaaacccacgctagtggagcatctgtcatactgtgttaccatcaacgggttgtgtatcagtcagggtctaactggggacagagaagccaggctaattatttaaaagattgtcatttaattaaaggaattcattgcagatgtcatagaggggactgagagagaacctgggggtgaacaacagcagaaaatcgccaccaccctgtgatgaaaggaccaagacaagaagcaataaatataccaaagctcagtagctgggtcgctgggctcattagctcaggagctggagccctagtgggccagtccagcaggggcgggagcaataagtgaaacatggccaattttggaaacctccaggcacagggggagaagtcctggcttctcccttcttctctaacctcttgccagcgcttcccactgggaggacccagttggaaggtgctagaaaatgcagcctgcatgagttggcccctgcaggggtgaggcagaactgactccagtcctagagacccagcacagacccaggctgtatctgtctccctcatgtgttttcttaaacacaagaacctcatcttacttgcttttgcaactgcagtgcctagcaccaagtaaggtttaataagtatttagtgaattgcaatgaactctaaggtttccttccaagactaaaattatgttgttctctaccagtgcgttggtccatttatcataatgttgaaacaaaaacatgaaacatttaccaagaaatttttctttttttctatcgtagagtttgtgtaattatttacttaaacccatgcgttagtgcagtctcaatcctattcctttattaacatgaagccagtgctatttatcagctcttggttggttttgaaaacattttccaccaactgtgcgtcagattaaatacaggaagggaaatggagacattgatttaataaacactaacaatgtgacagaaagggaaaaaattatgttgcagaccattttcacataactcatcctaaatatgcctttgaacaggctcctgctggtctgtggccaggccctctgcgccactcagcacaaaccttctgcagtacagcccacaaggccgtgggcacagcacaccgggtctgagccagagaactgtgtcgacggtaccagccttcctttttaaattgtcttgcattcccttggtggggacattccaaagaagacagacagtccccgcagcaggtgcatgtggtgctggtgttcagctgcgtgcattttcacaggttgctgtcttgcaggcgagtcaacctttagcctcacccttctgtcaccagcccgctgcagaatcttgtcgattgcactgatcagacataaagttatcgcgtcggctgtgccatgggatccaatgtttgatgtacgtggtccagcgaggttggaggaaatcttagaaaacaccccaagttctttgtttccaaatgaggaaatcgaagcccagaaaagggtcactttttgtagcttttggcctgtaactcatgtcactcctaacccatcatcatttttgttttgctgcacaagctctggaagttgttttaaaccttaactctgaacagagtgttacactgtggttgtatttgtaaattagtttgcttctcttctttctgcctcctcttatctctatttatgtttttctatatacctcttcttattaccttgagacttgaactcaaaaatcacatgttgggcacttgctgagtcctagataatatccagggtccatataacttggggtttttttctggcaccaacatccttatcatcagtccaattgctctcacttcaaagtccttaaatcttgcacttattttcacttcttagtgcgttaacagattgtacacaactcagaaggattgactctagccgcccatgcctggtagtaacctctcttcatgtcagtagaattttagagtctttgtctttgaagtcatcctccaacccaggccagggcagggatctctcctgtcctagatatcttcatggatacagttagcaaagttgacaccaaatgttaagcataatgagattagcctggttttcttccttcccttgtcttcccttcccttccttctttttgtccccccatttaaagactttctaaatctgcagagaaccagttttaacttactccgcagctgaaattaccagatgcaaagtcaaggcaaatatgatacagtagtagttgttttgcattgattatatctgctcctcatagtaaccctgaaggggtttttatagtctgcatcttatgaagaaattgagaaagacagagaagaggtaatctacccagtgtcacagagatgttaagctgcaaagctaggctatagtcttgggcctcatggatttcacacctgcccattacactgtgtcactcactctactgcattaggaagtacagcatcagctggtggctataacaattacaattcatacaaataagtgtaatttcaagaccaatcactcattaatgttgacataaataatttactagaaaattctattttggtgaagttttaaaatagcatggctttcactgtgctaataaatatttaaagaaagatgtatttgttttttcccagcaagtataaaaataatttcttcaaaattcgatgtattattttaaattagttaatagatgtatcacagccatggactgcagaagttgtaaaaccttatttaattctaaaatttcttaaatatcagagaatacatttttgttctttgaatattggaagccccaaaagatagttgaccatgaagaagaagatgagggaaatatgagaaggcagatgtttgaagagaataattatctgtagagggacatgtttttagattcaatgaattcatcacttgtaaagtggaaatcctggccaaaccacataaatggatttgagctgactgccagataaggagcatttcagaaataaaagggcaatggtgcagcttgaaggataggcttccaaaagcattctgataaaaataaaatgcctcaagatgctcaaggttcctgggtgatagataggagcttttcctgggaagagcatcagttattaaaataggaaggagggaaatttgtaacaagaaatgaagaggccaaagtgtgatagttgttgattgggctgcatatgctttcaactatgtgatagtccagttacaaggttacttgttgatggtggctccgttgttgcccaaagagccagatccatgattaaacaagaaaaaagccaacgtggtatattaacatccaacagtgaaaaaccaatgtctgttacccaggacaccaaagggaacccttcagtccaaaggggctcttaatttggaagggaataagcagcagtttatgttataatatattataattgcttattttaaagataatttgtcctagtttgtgaaagcctcccccccgcaacaataaattttctatgaattgcacaagtcaacacatagaaaatttggatgcagtgaaaccaaggataagatgatttggtgtttgattggcacttgtctcccatccctcccagcagccgatcctggttatttcatttcattttggaccccacttgtaacatgatgttagaggactgctgtattggttactgtgattattttaaataacttattgtgtattcctcataaaaattattaaagggtgcaaattgcaccctgggggttggtgttcaaatgggagctaaacagcaagaaaaggtagtttaaaatactattcctcataggcagagatacaacacatgtgatccccaaaagtagatatgagcaactgtgttgcatgaaaaccatagataatgaattctcttttttaaacctgaactaagtaatacctggaaagtaagtgaaattcacatgtaaaggaatgtatatttttccagatatgaagctacccatcctttaatatgttcttttccaaaagtatacattgtcctttttactcaaaatgttcaggtaagcccacagttaagactcagacctgagggaagacaacatcagttcatctggggaaaatatagacaaggcctccgctaaagcatccagcatatggcagatgatgtcagccagggatagccacttacaacatttagaattggtgtgattcttatctgagcgtaccctctcctttataactgtattcagatctccacatctgagagactggagggatttgggttttgcatttttggtttcgggatgtgaaagaatgtatatctttctgctgaggagggctgtctgagctctgagtttgtagaaggtgctgcgaggtgggctgcgggagcctcaggattctctacccctcctccagctcctgccctaagagactacagtgtcactttaagggaagtttaccctccctcaacccacttccctacttccaggtcagcccttacctgtcagagcccatcactgcccctcatactctgaaactagtctcacctgagtcggcagctggcttttaattccaattccaaagattttctgtatctttcttatagacctctctgtacttttgtcagttttgggagattttcttgagacagagtcttgctctgttgctcaggctggagtgcggtggtgctgtcatagctcactataacctcgatcatagctcccataaccttgaactcccacgctcaggcagtgcccccacctcagcctcccaagtagctgggaccacagacatgtactacaaggcctggctaatttttcaactgtttatacaaacaggggtctcgctatgtcgtccaggctggtctcgaacttctgggctcaagcaatcctcccacctcagcctcccaaagtgccaggactacaggtgtgaaccactgcgaccagcgttgttttgtcttgaactcacttcctttggttcttaaaaacccttcttcagattctttttgtgttccagctagcccaactccttctcggccttttccctcttctgtaacttacaggtttgggttctacacctcagcattgagcccgtagatactggctcattcttcctgaatggtccttgtactcttctggcttccattcatacctgcacgtgtatgacctccaaatctaaatctctgaaaagttaggtcacccttcctggtgctggactcagtgacccagtgccctccagatgtatcaatctacacacattattaacacacacacacacatcctaagctcggcacttgtgaaaaagatgtctttgtgttcccctgcccacttcctcctctgcctgtgtttctgccttagtaaatggctccaccatccaccagctcacagagccaaaagccgaagtcctccctcttaccagactcatcagtcaccaggcctggtaatttgccaagtctccttgcaggctaccctgcccagcctcacaagaacctcacggtctctggccaggatgcccatggaggcccatcctgcagcttctggtgctctgaggctcccatgcccttcctctgcctttgacagactccttttcctaaatactgtcaacatttctttattttgcttttacttatttatgatctgagaaaaactgttcgcatccagagggcaggctgggcctgcctgtaaccccagcacttgggaggccgaggtgggtgaatcacttgagcccaggagttcgagaccagcctggtgaaaacctgtctctactaaaaatacaaaaaaattagccaggtgtggtggtgctcgcctatagttctggctactcgggaggctgaggtgggagaatctcctgagcctgggaggtcgaggctgcagtgagccaagatcatgccactgcactccagcttgggcaacagggtgagattctgtctcaaaacataaaccacaaaacaaaacaaaagcagagggcagaaactgtatcttccttccttgtagcctgagaagccatacagtcctcttttcctcactcccattgcgttgtaaaagcaatgactcaggaatgagatcttagcaaaatttaacagtgaggctaaaagacttttcctacaaaacagtatgctaatattagagtacatatcatggactctttttcctcaaattatctgaaaaattatcagacatcagaaaaactgagttgaggccaggcacggtggctcacacctgtaatcccagcaatttgggaggctgaggcgggtggatcacgaggtcagaagttcaagaccagcctggccaggttggtgaaaccctgtctctgctaaaaatacaaaaaaaaaaaaatagccaggtgtggtggcgggcacctgtagtcctagatacttgggaggctgaggcaggaaaattgcttgaacctgggaggcggaggttgcagtgagccaagattgcgccattgcactccagcctggcaacagagctagactctgtctcaaaaaaaaaaaaaaaaagaaaaaaactgagttgaagttcatattttgttctacgtgtaatttatttacttgtgaaatcttgtactgtcatgaaagacttaggtctaaagctgaatatgctattttgattgattaggtgatatgttgtagaaccgtataatatttatggtttgaagtatagtttatggtatttatttgatcgaatgtgtattaaagtgaaaagtatattgaaatattaatatagttctaaaccagattaagtaaataacgtattgaggtagtgaatctttttccttctatagtttatttgttagatttttgtaaaaccattgttagattttgtaaaaccatttgttagattttgtaaaaccattggcacttttgtgaagtttgggaaataagaattaactacatttttggggttttagaatagagcaggaaaattctggtgttaatgattgcctataacctcaatatagaagaataaggacgtggaattgtaccacatcatcaataaaagttctccttaccctaaaattctgcaggtgggtccatcatcctaatcagtaacacgcaatttcaaaaaatctctgtggtcagtttattatgcttgttaagagtttttcttctaaagtaacatacagaatttggatgatctgagtgagtctgagcagggccccaggtggatttataggtgtttagaataaaaggatgcttttacataaatcagtacaattagttttattattgcaaccttgttttaggcatttatgttagctggtgacaagacgatgaaatcttcagatcctgatgtttcagtgaaccacaaatagaaggaagttgacaactatcacactatggaattgcaacaatttgcagagatgacagaaagggacatctgtttccagtcagtgggcagggagttggtttcccgtaggcagctgcctgcaccttctgtagaaggccaccaagtgctcagaggttatacactcgcattcccggagctcttcggagagcacaaggcaggagggtcagtgacgttctcgcattctttttctggctggccattagaattagtaggccacatctaatacgtccacacaggtccagatatcctacacaggggtgtgggttcccaaagaaggggggatcggtaggccctacacatttgttgctcatctgtttgcatctcaggcaactgtgagctggctgggcttcctgactgtgacagacacaaattctaatccttgtagcctcattcctgcaattgtacccagacccttgcctgctaggaagcccaggagatgccttctcttacagggaaccagtcttggaccctgcgccatgttgatccagaactgatgtggactcttttccgttgattttcaatgtgaagggaaagggacaagtggggttaaatagaaccagacctggccaccctgtttactttagaaagcaaaggaacaacctagaaacacatgtcttagtaggaacacaaattaagaaatagtggccctcctcacaccagaaaaggattgcaattatcatatttagcctaacaataccagtcaagtttccccttcccagatccaccagtgtagccctgccaagagcagcagcaatttacttgccagttcatgaagtctttctaaaattgtattttattaaagtcttttatttcactttcagcgaacatttattatttgcctcctacaagccagcacaccgcaagacatttgggacagaaagggtaagctgcagtccacagctgtagagggccaggctaagtgctaagagcctgaaacgcacaggttgtgaaatccttatctgctttttcctaccacctttttcaacttaagaaaaatgacgctattaatattgatgtccagcaggccaacatttctttttgtaaattgtcaagactgaagttaacagtgaacaagtccagatcccatcctgccatgtagatccagtgtagcctggggataattcaacccttagcctccatttttttttttctgtaaaataggcatgatcataagtccctctgtcccctagaagacatcaaaataataaaaaaaaatggacatgaaagatgtccattattctcataaaagatgctacctagatccagcgtaggaatattttatgatggctttgatcttcatctttctgtagacatggggtttaacaatttaaattctttctggctttgtttttctaagattgccacataggtagattatgtaatcctagcatcttctgtgtggttgttctctggctgcataagacattgcaggaaaatgatagtatagttacagtgtctggtttgttaaatgatggactttcatcattatcaaaggataattcttttccaaatagctgagatggatggggaaaccagtactagccaggaagctacccttcagcctgcttcccccatctgcaaaagaactgaatggatggatgatgtcctacagcacagtccctcctccttccacgttgtctgctgtgcctctcccactcagaacagagtcactaaaggcttaacaagaacaattaatgcagtggtcacagacctgacctcctgtagatatctggattcatttcctagggctgctggtagaaaatgccacagaccgggctgctttaaccatagaaatgattgccttgcatttctggaggctggaagtcaaagatcaaggtgttgacagggttggttccctctcagagcagtgagagaaaatctgttccaggtctctcctaacttctgtttttttggcaatcttctgcattccttggcttatagaagcatcaccctgatttttctttcctcttcacgtgcgggccttcctgtgtctgtgtctgtgtccaaatttgccctttttataaggacatgagtcatactggattagggctcaccctatttacctcatttcaacctaattgtatctgcaatgaccctatttccaaataaggtcatattcagagatactaagggctagggcttcaacatttgattgggggggaatacttaatgtataatgatatttttttcattgaggtatgatatggtttggctgtgtccccacccaaatctcaccttgaattgtagttcccataatccccatgtgtcatgggaggacccggtgggaggtaattgaatcatgggggtaggtttttcccatgctgttctcataatagtgaataagtctcacaatatctgatggttttaaaaagggtagctcccctgcacacactctcttgactgctgccacgtaagacatgcctttgctcctcctttgccttctgccatgattgtgaggctcctcagccatgcgtaactgtgagtccgttaaacctctttttctttatagattaaccagtctcagatacgtctttattagcagcatgagaacagactaatgctaggtgttctgggttccttctgtataaaattctcagtaataactaaccagataaaagactgaattgcctttttcttttttttaataagtgatgtggtacttttattccctgaaaaaaatcctctctcagctgggtttgtgaagtcacagtgactttcaggtgcttactgtttttattcagactaaaaaaattattaggtgggggcagggcgctgtggctcaacgcctgtaatcccagcactttgggaggccaaggcaggcagaccacaaggtcaggagatcgagaccatcctggctaacatggtgaaaccccatctctactaaaaatacaaaaaagtagccgggtgtggtggcaggcgcctgtagtcccagctactcgggaggctgaggcaggagaatggcgtgagctctggaaggcagagcttgcagtgagttgagatcgcgccacttacactccagcctgggcgacagagtgagtctctgtctcaaaaaaaaaaaaaacaaaattgtagatgggtctccttcttgacaggcattgaactagttgctgagaatgtaatgaaatgcttggccattgtcctcaaagaactagtaaagggaacaaacatgtaaaatatgtttcatgtaatgattgaaatatatacacagaacaaaaaaattaacttggctaaagttgtcaatctttttttttttttttgagacggagtttgctcttgttgcccaggcaggagtgcaatggcatgatctcggctcactgcaacctccacctctcaggttcaagcaattctcctgtctcagcctcccaagtagctgggactacaggcgcgccaccatgcctgcctaatttttgtatttttagtagagacgaggtttctccatattggccaggctggtcttaaactcctgacctcaggtgattcacctgcctcggcctcccaaagtgccaggattacaggcatgagccaccgcacccagtcagttctcaattttcatagtaaatttccataattaaattgtcttaaatgtggatctgagtgtatttttatgctgtttaaacccttcaataagcttcagcttgacattatgaaatagtccatgattcctaacaagacttaaagactctccacaatctaacttgtttccatggcaactttcccttgtactctgtgctccaccatggtagctcctggaatgttcctggccctctccagcatctggggccttgcctatacctagagcagggtcgtctatttttcccattccatggcccctcccctgtcaccacatcaactcctacacatctttcaggcatccaggatctttcctgatcactctccactcctcccctacctaccatcaactcccagagcactgactgtaacttttatgccatttatcattcatttaatatatttgttttccaatacatggacggggactctggggagcaggaactgggtctcccttatagtccatggtatctgctgcatggaatactgtgtctggcatgtaataggtgttcaatggctgttttgctaaatgaatgaatgaaacatgcaacagatcatggggatttggggatcatgtccccaaaataagcttaaaatttgaaaataaaaataaatgatttattaccagtcacaaaaaacttaaattttaaattatcgtaggctaggcatagtgattcacgcctgtaatctcagcactttgggaggccaaggctggaggatcatgtgaggccaggagtttgagaccagcctgggcaatatagcaagagcccatctctacagaaattctacaatttttaaaaattttaaattattgcagagctctcggaaatgtttgaaagcatgaacaaatagattgaaaatgacttggtagtgacttctattggtgcccagagagccctgggagggccacaggcagataagcaaggcactttccctgcatcctgctgtgcctcccgctccttctccttgccactctctcctgtgtgattgttttgtgtttgatttgcctcctacccagtcttcattcattcaccttcttccctttcctgtagctcacatgcatggtttgtcctgatacgagcacacaaacactagctggatattgccctccgtgctgcacggcgggtccctgtgccccggagccccactcctcctcggctgctccacacactggaaactgcatctgacagaaagattaaacgtctgcattttatcacctttgttgaacaaaagtccatggcttcttcatttcaggagtgagttcagtgtttggtttttttctttgaaaataaatcaggtttgacttttgggggcccccaaatgattcccaatctcaaaataggctggtagctgcctgtgtcagaattctgagcttttctgggtcataatgccagttagcatttctcaaaccatggcgctgcttttgggccagcagagtccgaaaagaaataataggatgtatgttgtagttagatgagttcatgctgagaaatacgtgtctccacacgcagagatttaaaaggcctgaatattcatacggtcttatcaaagccactcactggttattagttcttcatagcaagtgaaagatatgtaaatcctcagaggttcatggtatatccaggctgaataaatctgaaccttaaaaaagaattggcacattgaatttttcgtagatgttcatccatctctgctgttcactcatataacaaggtgtttctttctcaggctgctgtcctgcctagagtatggcaaaagcccagatgaaattgcgattgctttgtctccaaactgtatttgatttagctttatgttgataccatttatcttcttttgcttcaaacattttacattgccgaagatggctttgaaagcagaacacccacatttggtatcactgcattcatttctcttatgttttggcttcaattcagtgcttttaatattcatgaaggttgaaaaaataaacatcctagactatttcctctgaatggaaatgttatggtttcaaaccctagagaaaacaactggtaagttctacaaacccacatcttctccccgtcagttggaaagtggccccagcttggcagaagtcacagcccccttgacactctggggctttccagagcagatggccagggggcctgtgttagggaagaggagagagtcagcagacatgaatatttaaagactccctttggaatcatagatactagaaccttttcagttgattcagaattatattatttctgtcacgaagaatatagaggaatcatttattccgttgacttctctgtgttcaaatgaacatcattgaaattttttcttagtcctctctccttcatttacattgagcctgtattgattttcatcctctctaaaattagctcagccagtcccttctatatagagaagaattcctatggaatatcagagcagggaatagagagcaagaactccacgcaaattcgaaagccaacctttaaagagaaagaaaatgattactctaaataattaaaagaaaactgatactcagaagtggtgtttcaataatagaacagttgtaggattcctgtgccgtggtaactccgtggattacccatcttgttgactttccgtcactattgtccaagatgacattcccagactcaccagctctcttcttccctcccttgcattcagagggtggtcccatgcctcaggctgatggctgcactgtttcataaatggcagtgaaagttctcccttattcttccacagtacaaggtgagcctccctaatgtgaaaatacgaaatctgaagtgcccccaaatcggaaacgttctgagacctgacaggatgccacgggtgaacagttcgacccctgagctcatgtgctgagtcgcagtcaaaacacagatgcctctctttttcaaaacttctctgtatcatctatcttctctgtcttttttgggaatccctgcaatttttctatgtgcttaaggctaacaacctcttcccgaggttatgttctgcatctctgtggctgactcacaagccgctaacaacctctttcattcctaccacttcccactgaggatgctgaagagacaaatatgggcatccccagcctccatcgtaaatgtgcgtgaccatgtgagccagagtgggctggagagcaccagggaagtcaccggacgtccagcacgcaggcagagctggtgggggctgccttctctcccttccctgaaggcagatgggatgcccgttgccatagtgaccatcctggaacggtgaggctgcaagcaagaggaaaggtggcccacatgagggtggcggtgctaaagcactgaaagtcctgggcacctgagagcaccaagaaggcagatatatccttcagaattacattgggtcacaaatcaaccactgtttgtttgagccactgtttgccgaatttttagttacatacaaacacaacctgatactcccctccatgctacccctgaacaaaatgaagattttcaaaaaaccttgccagcggccgggctcagtggctcatgccagtaatcccagtgctttgggaggccgagatgggaggatcccttgagcccaggagtttgagaccagcctggcaacacagtgagacctcgtctctacaaaaaataaaaaattagatgtggtggcgctgcacctcgacaatggctggagcccatgagtttgaggttgcagtgagctgtgatcatgccagtgcactcaaacctgggcaacagagcgagaccctgtctctaaaaaaaacccaaaatccaaaccttgcctaatcctgtgactacttgtacatttttaattcccctatccccatgggcttttccctaatgtcactgaacttcccgaacgtgaactcccaaaatgctttaaatgactgtgctctgttgctccacggttctctccagcttgtaggtagggcagccccacgtgctcctgtgctgccccacgtgcctttgctccttgcacaacgtggggcttttctctcatgggtcatgagggtctttctagtctctgagacccataggtctttgccagtctgccccttagcctgcctgcagcatttaatgctgttctcctctccctccacgctgacactctcccctcacttctgcactgcacctggaatgatcttttaacaatgtgaatcaaaccatgttccttctctctttcaaaccctttaatgatgtagaattatacttagaacccagatacctgctaacaagtcccagtctggcctggccctgtcctgttagcttccccgtaaagcactatctgcccacctccgcccccatcccccaccccgcccagttcctcctgtgcattaggccttgcactcagggcctttgtgtgggctattgcctctgtgtgcagctccccaaactctcttgccaatttctgcaccttctgggggactcagctcaaatactacctcgtgagggaatccctaagccctctctgcaatggcatcaaaatgctttctttcattgccatttatgacaagaatgttaattgtgttatttgtttcgtgttaacatgtttccccttccccagaatgtaagcatcttcagatgaggaaccttatgtggtttttttttcgtcattgtgtgcccagcaagtggctcagtgtctcacacataacatgggctcaaaagtattttttggttggataacaaatgaaggctcagtgccatctcactgtctgtcagatagaatctcagccacccagctgccatgcatgggccttagggtctggctgcagccgacctgtcacgcctcctccacatcccccacatgggaggaactactcagccttgccgccggtgttcctttcgtcctgctggtcctgcctctccagctccctcctgttgctattttaatatgaaaactgcacccactttgacaagaccagttcatgacacattttggatttgtccccaaccagaagtgacctctgcctcccttgttcttccacagtacagggtgagcctccctaatgtgaaaatccaaaatctgaagtgcccccagatcagaaactttctgagacctgacaggacgccacgggtggacaattccacacctgggctgatgtgctgagtcgcagccaaaacacagatgcatagaacacggttcatttaacgtccctaagggaaaaagaaaatcaccttcaggttatgtctgtgaggtatatatgaaatgtaaatgaatttcgtgtttagacctgggtcctatctccaggatacctcatgatgtatatgcaattattccaaaattcaagaaaatctgagctccaaaatacctctggccccaagcttttcaattaagggatattcaacctgtatattgctttatcttcattatggctcctgtcctatgctaagcagttcgaatgtaagatgccacagaagtgactgtgccccatgggctctggtgtcatcccccacccccctcgactgacgagtgcagaaccttgtttgacaggcatgctggataagcagtgggctgtgatggtgggtgctctgcccgtcgtgaggctgagagcactgaacagtctgcaatacctgaaccaaatggaagtaaattagaaggagcttgagctgggggaagaatcttgaagcccgtggccaacgttgaaaagagccttcatcagagtgtgaagtggcatccaagacagggaaaagccagggccaggtgcggtggctcacacctataatcccagcactttgggaggccgaggcgggcgtttcacctgaagtcaggagttcgagaccagcctggccaacatggagaaacccccgtctctactaaaaatacaaaaattagctgggtgtggtggcgggtgcctgtaatctcagctacttgggaggccgaggcaggagaatcacttgaaccagggaggtgtaggttgcagcaagccgagatcacgccattggactccagcctgggtgacaagagtgaaactccatctcaaaaaaaaaaaaaagaaagaaagaaaggggaaagctggagagttgaggtttggggacctgttataaacttacccacacagtgatggatgctccccgtacagtagaaaaaatgtagcacggaagcacgtcagcttagctggctgagcagatgttgtgctgaatgtggatctcagaggggaacagaaaggaaaaaggcctctggtgtggtcctcagaaaacagcacctacctccagtctcttgggattagccagagaagaaacgccagggagcattttgcttggggattccttggtgtctgttttgtcgcagcttcccgcaagaaagaacccttttcatcacttgagtaaccattgccccctccccacaaaggaaaataaacaggaaaatttccctctggggtggctctcgagcatcagctgtagctgctgtagcaaaagatcaaacccaaatacttgcaccttgtggtcattggcatcaaaggctgcaggttttctttccacctaattttaatatgcttgtgagccttgggaggcttaattaaaactgcaggggagccaaagtaagcacacaaaggaactgttttgatgcttcaaaaacccaagcaaacagaatctggattattcaattaggtatgcttatgggatttgtcctgggtgttttgattgctcaaagcctgctggggaagtcagttatgaggtttagacctgaaaggaaccatagttaatgccccccaaatttcacttttcatcttcttagttaggcttcccgttaccagtgcattgttgtgagctgtgcatgaacttttctttttttttgagacggagtctcactctgtcacccaggctggggtgcagtggcgtgatctcggctcactgcaacctccgcctcccaggttcaagtgattctcccacctcagcctccccagtagctgggagtacaggtgcatgccaccacacctcgctaatttttgtatattttggtagggacagggctttgccatgttggccaggctggtctcaaactcctgatctcaggtgatccgtccaccttggcctcccaaagtaatccccaaagggattacaggcatgagccactgcacctgccctgtgtgtggatttttattccaacttctgtttcctcagctgcttcttctacagatgccagataacatggcagggccagctcagtttcccatcttaattttctgcctcgcttggcggggatgttcttggattcccttcctattttccctgatggttttggctatgcaggatagcctggcagttctgagcacaggatctctaagctagaccgcttctgtctgcttggccccagacatatcacctaatctctttatgcctcttaataccatctgcaaaatgaaattcaagatcacagggtttcctctgttaattcagtttcttttttttctttttaaattcatgttaaagtgcttagcacaatgcctggctcaggatgagtgttgagtaaatgacagcagtgatcgtgattacactaggacgtaggtaggtgcctatcagtcaggtgtagccagtggttatgggaagactgggagggtgcacacctaggccttcccaagggcatgggggtagacccagcttcagtgctgcactcaagcccagtctaaggcagcctcaaaggccacgtgacagatactcacacaagctgaagttggtggagtgtctgtccacgggactggcttacccagagtacatttcaagtgacaaggactcttgcagtgagcttggctgcagctaatttgtcattacatcatgaaactctccctctgaaaatggaactcagagtccaattcacagaggaatttattgccaagatcacagccacagcaagacctggaggcaggcagctctgtctcttggggctgagtcagtctgggctgatggtgagtaccatgcaggcccctcctagaatgtatgcttgtagctaaccagctccaaataaactcatatgcaaaggcctaggaggaaaactacccaaaagaaaaggtttacctgatgctaacttaagaatccaaatgaaaatacttagtgtcagttgctaacagtttatgaagtggtgttacctgtgctgggccttaacttcttttccagatgtttctaccccaacaaagcagcctgtataggatttctagtatgtacgggtaggctgtgtagaaaacagcttccctttcattgtctctagtgaatccattaggtaagtgtctgcctgtgacagagcagccactgagaatacagggatgtagagaacgtgtacctcacactaggaggctgtcagtctagtgacgaagtgagtacacataggcatggcattgagctgatacagatcgcaaggcacagtggcaggaacacgctctgcagggtctgcagccttgattccaatggtggcttttacctccggtcagcagtgtgaccttaggaagattatttgacatttctgaacaaaccatcctcatctaccaaatgaaggataacgctcttgtggtaaggccaccatatgtattaaatgaagggaaggccagtgaccagcacagtgcctgacaaatggtcatcatacaacaaatggtggctctagaactgttaccatcatagaggaacacgggagggagcagaccattctacctggagaagctcaggcagtgttctttcagctgtgtcttgaaggaggaagaggaattctaaaggccagaacagtggtggaggggcactgccagctgagtgaagacgggaaaagacaaagaaaaaaaacaacgttgaggatttgaagaaattcatacagttcggtgtggctgaagtgcaggctgctggtgactaagggccaggagctgggtcctgaatgaaggggcaagaccaggagtggactcagataccattctggagagttcgatttgccaactttagcaagaatgtgccaaaaatcccagctactgttactaagtgctaaggatgctactaagctaagctatatatatatgtaaaacattggatgtccagcaaacaccctacaaagatgacactctgttttacaaatgagtaaactcaggcttatggaaattaagttacttaatcattaaactcaccctattaaattatggtggatttgggcagctgcctccctgaaggacatgttgtctcagttgatatttcatgtaaattctgttgtcttgtttttcggattcataatcactcattgtttttctaccttggtacagcaagcaaataaactctccaccattgtcagacttgaatgagtttagtcaacttcccctgctgggcagttgattagatagaaggagaagtggctcactattatagtgtaattttctgatacaaagattcatttttacttggtgtcagtccatttgcattgctgtaaaggaatacctgaggctgggtagtttataaagaaaagaggtattttggctcacagttgtgcactctgaacaagaagcatggtaccagcatctgctcctggtgagggcctcagaaagcttccagtaatggttgaaggcaaagcgggagctggtatatcacatgcaagggagagaacaaggggtaggggaagcatcacactcctttaagcaacgagatctcctgcaaactccttaccatggagagggcaccaagccattagtgagggatctgcccccatggtccaaacacctcccatgagaccccaccttcaacgtgggggatcacatctcaacatgagatatggtggaggcaaacatccaaactatatcactccccaaataaatcaagcattatattaaaaactgcacactatattttaatttttcatgatagatattaggcttgagttgcaggtaatatgagacctttggtggaggttaagcctaaggatttcataaaattttgaatgttaccataaacaagattcaaactaactttagatgaatcatcctcagtcaaaagatgggaaagtaggtgttagcatcagccttagaaatggggtatgtcattcatcaagtacccagagtcctataatctgaattcctgctgtcactcccacccttcaaagtacccaactcacattgatttgggatgagttctaaacaggtgtttcctctgtgttgcaaatggtttgaactggagccttgcatacctctggcatgttcatccagacccagctgatgctcatgagcatgtatgctcatctgacggccagtccttgctgattcccacgttggtcagcactggacacagaacagatgttggggattatagggaaggattcgggaggccatgggcctgagtgtctgcggaagtcattcattgtggagacgcagacaggccctgcagagtcttcagtgagaagtttgattaaataagcctcaatgggcctgcgtatcaggacgcaaaacaaatgttttccaggtatcccttaattgaaagaaaaataataaatcatcatcttcaagtcaggctaaatgaggaagggaaataatcccaatcccacaagttttcatctgacttctaatctaggagttcattagtgggatcatggcacgtaagcatccgagtagaatcctctgattaattaattccatgaggaatcatcggaagacagtttgcagagcagagggaggctgactgcccccgtgggaaaactcttttaaggttgggcccaattttccccaatatgacacaggactctttcttcctggtctgttctggttgtcctggagtttctttgtcaagctgctccactgatggtattgtctacacctcagctacctgtccaagacactctcagaggtctgaggcgtggaactctgtgggctatgaaagggttttactttttgctgaaccacccacctacagccctccgcttattgaagcagcagaaagctcaccagaggtggcttcttgtttccttcagtgtttccaagttactctgtagacttagtgaacctaagctttgcactcctcatagctgtgtatgagtctttttctgcgataagcatagaaatgtttcatctcaggagaaagcaagttggtaataaggaaaacaaagcaactgacaatagttgattaatattttttaaagaagaggggataaaggacacatacaactgtatgtcattgacattaaatgccatacaaaaacgcaagtaaaactataagggaaaacaaaatgtacccttgtagtaaatattctgtgaaccaaaatctcaagtgcagtcatagaagtcattcactcaacttttgtggcattttattttttttgctttgtctttctattctttctttctttttttttttttttttgaacagcccaatgtaactccattggttgtgtttggaaaaatgaaagaaaaggctaattattgtcctttgcttttcttgctctgaaaacagcttccattctccacaattaatggagaaatataagaagacagttctatataagcaaaagaaatacctcggggcctttaacaattaaaaggaacaaagacaggcgggagcggtggctcacacctgtaatcccagcactttgggaggctgaggctggcggatcacgaggtcaggaaatcaagaccatcctggttaacacggtgaaaccctgtctctactaaaaatacaaaaaattagccaggcatggtggcaggcgcctgtagtcctagctacttgggaggctgaggcaggagaatggcatgaacccgggaggcggagcttgtagtgagccgagatggcaacactgcactccagcctgggggacagagcgagactccgtctcaaaaaaaaaaaaaaaaaaaaaaagaccaaagacataggaaaggaggtctagatgatttttatgaagagtatatatcaaatattatttatatattaatccagctttaagatgggaaaatgctataaacgtgggaagttctccatagaagaatcagtcaaaagtattcctgtttgctcatgtctaagaattctgaaactagggaaactgtattgaaaagataaattgaaatatattggaacgggaaatgtagctaaagtgtttccattagggtacaatgagaaaaactggatctgttttatgtaaattttcaacagtgacctggttaaaaaaaaaaaaaaagttgaagtacattaattaaatttacagagccagaaaaggtgaagacccaggaggttaaacatagaaaatacagatggactgaaagagatgagaggaaacggacggacttttacagcatgatattcagcttggaaatatgcgggagaatacgacagggaataccagccaaaagtcagatagctagtttaaagaaaaagttaataaaacgttgaagtctgaaaaactgtacagaccaaagccaggaaattacaaagttatggatcccgcagtaactgtaaattaaccccattgcacatatgtagtatttcacattaccgtctgtggtgttaactttcatgcctaaacatgcatgtgtgtgtgtgtttcacctgaattatggttgtaaagggaacaaaggtgctaacaggacacggaatggatcgccagctcctttcatgggtctcccaggagcctctaggcccaagctgctcatccaccatggaatagagcaagcagggagacatgctttgattcaaagagtgttctccagaggggctaggaagagacacctgtttcttgacaattattaaggaagtcgtgagtgtcgtgggtagatggaaggatgtctgcaacacgttccagagacaatgcattggatttccatcatcccttctcctttcctttttttttttttgaaatgaagtctcactctatcccccaggctggagtgcaaaagcttgatcttggcttactgcaacctctgcctgcctggttcaagcgattctcttgcctcagcctccctagtagctgggattgcaggcacgcaccaccacgcccggctaattgttgtatttttagtagagatggggtttcgccatgttggccaagctggtcttgaactcctgacctcaggtgatccatccgccttggcctcccaaagtgctgggattataggcatgagccaccacgccaggccttctcctttcctttgattgcctcatgggaactactctctctttcaccagcgtgctccttttacccccattttttgcctccataccacagtttgtcctctgcatacccctttgtcttggagggctcgttccaggtgctaagaggcagtgctttccttttagagcttccaatctatggatctggttatttgtttgcccgttttggttgatttttgtaaacattttttagtcaacttacatggtgtgctttccaacacatctctcacttcaggcacaggaccaggacggaggagtccgcagcctccctgaatcattgctcaggcctctcttctggttcatgtgtctgcttctagcgtcttccaccttttctcatcacagcaatgcggtggtttgccactcttcttcctgactttcgccatattggggatgtttgtgccaatgtggagactcctctgttaccatgtcttcatactcttttgacttccctggctcctgggaggtccatgtccacaattcattcccatcccttggcagggctggccctccacaacctggaatctgtgtcatcctcaagatcttagcatccgattccccgactcacagccatccctggttcggctgcctcctgccaccatccccactgaaactgctctgaactttcactgccattgccaacctctctgccttgcagttgacgtccactcctaccagttctcccaggcttcgcctttcttcttccagtggggctccaaaaccacttgtgtaggtgggacatttcttcttgtccttaactcccctgcccttcttggttctgggtttctgccctgtcgtccccaccatctgcttgactccgtgcactcaggctgctccacgtttggcgaaacgtgaaaggatgtggatcctgccctcagtcctcgggagcgtgaagggctgtggctcctgccctcagtcctcgagtggcgctggcagttgggctctcctttgctgacttcccgtgcctgtcacagcagcttccaggggctggactcctctgctcttcatgccgaacttgactccgccttctgctcaccacagagagtgaggccccttcccggtggctcttcagcgtcctcctcgccaccctggaagcctcttcccagagtcctctgctgatgctgatgcctcccatctccgagttaagacctggccttggccttcagagctgccgctttcaactccattcctgaagctgttcctctcctcaccccagggcctccctgcaccactttccctcttgaggttttacatttcaagaccttctccctcctgcccgcttcctgctgccttcccgtcctctgggcaggccccaccggcctttcctccacactgactcatgcatattaccgcccccggttcccctccctcactgtcctcccagaatttccttcaccttcacagcacaggtcccactgacgaggacttcatggagggctggctgttcttcttcctccacctcctagcatagctgtcacccaggttctggtcacaagcctttgcccaccgtgtgctcctttcctctgtgatcacatgcatctccatgggttcacccctcagcaggtgcaggcggccctccccacagaggactagcctggcctctgagagaggctgagagcttgggctctagggccttgttggatgctggctctgccacgatcctggccaagctccgtgacccatcgtgcctgagtgacctcacctgtgagaggagaatcaacagcaacgtgggttgtcaggagggtgagctgagctgattcacagagagggctgggcacgtgccatggtgtgcggtagcagagtccacgtggctctttcctcactgtcacagccgcccttctccggccacatggatccatctttgtggagcactccacacccacaattcctcagcctctctccagatcgagaactttctgactcctccaggaagggagatccacggagcctcagagccgctagttccacctcccccgagtactgctcctgcttccctgggggacacttccccctcccatctggctcttgcttgacttgtcccctccactacttcaggggcctcctcctatgcctcccagatcctgtctgcccttcagttgctctcatagctgctgccttggtgactgttccctgtttgaaacgatcccatggctttctgttgtgtcctgaaggaaatctgagctcctcagttcagcagccctctttcctcacaggcttccctcccctccatgcatggcctaaacccaagcacactgttctcctgcaggaagcacctctgtaggaggcagcgtgtctggccgtcttctggctgcaatgctcttcttacctgcgccgaaatggatcctcaatgaaccccacacaggcgtctcttccagaacccgtgtgactctgctctgccctagaagtatctcctcacccgtcccatcctgaccaattgctgcttgaggacaaccactgtccctcttgttccccatatagtcctggcagcagcacacactgaatccaactgtggtgacttcatgcctgtgtccattctttaaaccagcatctcaggcctcacaccaagcaccagggcagagagtggaatgtatcaaaattgtggcaaattttgcaccaagagacaaaagtccaggaattaaataagtggcctattcaaatattaacatgccatttgcttcatatctttttgaaaataaataaaatgctgaccacattatatgagtctccttcgttgtcctcccagtctcactccccttgagatagaaatgctctcgttactttactgttgactgttttcatgcatgtattctgcgtgcataaacctatagaaaatattaacaatacacagtgctaatcatgcagggttttgaaactttaaatagattgtattatatgtactcttcctcaacactgggtttaaaaaaaaacaactgtttttgaagtttatcatagtgatataattgtagcacattccttttaatgctgttttccattatataaatttgccaaattttttttattctcccattgataaacatttgagtttcctttttttccctacagttgccagaaatgccatagtgaacactcctgaacatatctatttgtggacatgaatgaatttcccaagagggcataatctggaatgaaatgcacattgcaaatttctcagtctgtggcttttctctaactttttttatggtgtcttttagtacaaaagttttccattgttaatgtaggcaagcttatcgattttctttttttttgagatgaagtctcgctcttgtaccctaggctggagtgcagtggcatgatcttggctcactgccacatctgcctcccgggctcaagcgattctcctgcctcagcctctcgagtagctgggattacaggtgcgtaccaccacacccagctaattttttgtgttttaagtacagatggggtttcaccatgttggccaggctggtctcaaatccctgtcctcgggtgatccacgcacctcggcctcccgaagtgctgggattacaggcgtgagccaccgtgcccagccaacttatcgattttctttcatggtttctgctgtttgtatgttctctaaaaactaatcaaggtcataaagatgttctcctatgttttcttctaaaaatgttgaatgcttttcactgtgagctctgtgctctacctggaagtaacatctgcctgtggtacaaagtaggtcctgatgttttccatttggacgagtagtattgcctttttgccagaactccctcccctgtccatggacagggcatttgctagatttcaagcattgtccagtgaggtttttcatgtccccgctgagagtcttgggcattgcacagaagggaggggtctgagctggagcccttgtgctgctctgtgtgctccattagaggaacgagagcatgcgcctccagggtttgaacctagggagcatctgagatggtccagagtgggccatctggagaggcatcctctctccagagattctcagaacaataataatacctccaggatagttcagccgttgcaagcttgaaatccctggagaactgctatgctgtcaactggaggcttcctctcctcactcaaattacttcccttttataaaaatgattctagtcatgcacgatgtaacaacgtttcagtcaacagcagaccacacatatgaccaggatggtcccctaagatgataatgccatatttgtactgtaccttttatatgttcagatgcatagatacttagcattgtgttacagttgcctacaaaattcagtacaggaacatgctgtacagcttgtagtctacaagcaatgggctataaaagatagcctaggtgtctagtgtgcaatcccatctaggtttgtgtcagtacactccaggatgctcccacaacaacgcactcacctaactatgcatttcccaaaatgtgtctctattgttaagcaatacgcatctgtattttgtaacctgtcgatctctgcctgtatgatttgaaaacgaatgttattttcgcttcatagatcccaactttaatgggacttgtactactaaggaatagtgaggaaccgtgaaatccaatcaaacctggctgcctgtgtagactcccagccttctattcatggataagctgcatgttgcttattaactgagcaccaagatgtagcagctttgctttattgcgtaatgatgcatgactgcttgctcagttagcacaactgctgtgtgctggaggaatagagaaatcctgtggaaacagtccagttattacgtttattgttttaaactgttacattttaagcaaaatagaaaaagacaagggtcagaaatatagtaaaataattaatttatgtatggtaaagtcagactaggattactgggctaaaaattgaagctggactatacaaatttaaaggcttgcagttgattaaaatgaaagttatttaaatgctagcaaatcatgatatagaaaatattagtaaatgatgaagtattcagtaaagccattgtctgttaggcatataggcctgtaagagctgggcgggtggctcacgcccataatcccagcactttgggaggctgaggtgggcggatcacctgaggtcaggagtttgagaccagccaggccaacatggtgaaaccccgtctctactaaaaatacaaaacatagccagatgtggtggcatatgcctgtaatcccagctacttgggaagccgaggcaggagaatcacttgaagccgggaggcagaagttgcagtgagccgagactgcaccactgcactccagcctgggcaacattcgtctcaaaaaaaaagaaaagaatacaggcctgtagaaggattgcttaagcccaggagttctgtagtgtgtcataccagtagggaatctgcactaatttggcatcaatatggtgacctcctgggagcaggggaccaccaggttgcctaaggagtgatgaacaagcccaggtcagaaacaggtcaggtcaaaactactgtgctgatcagtagtggactcacaacggtgaatagccactgccctccagcctgggcagcataatgtgagtgtatttatcgctaataaaaaaattatttaaaaaatatgtatctctgacaccatgggacaggcactgactcttgaattggagagacctggattcaaatcctgaggtagtctcttactgtatgaccttggactgtccattcaactcctgagctttatttcctttatctgtaaaatgggaataattagtatctcccctacaagggtttttgaaataatgtatataggcatacccaggaaagaagggtttgatagaagagaggggagcctgaaaccaagacctgcctctcacttatgcctgaggccagtgtgtcattgatgaaaacaggaaatactagggacggggtgggaggaagtgagggttggttttaggcaaaacatatacatatttatgatttgggataaccttgttggaagtcggaatgattgcagggtgtgctggtgaatctgcctgtgcccccagcagtgtgtatgtatgtgtgtgaatcgttagcctgcaatgtgcacctcattctgtcaaatgcgtggctacttattgatgaggttctgggggagtgtgctttcttcatctttgtgtctctcagaagtaaccaaataagttctcaaaaactgctggcagaaggaaggcacgttaatggtggatgtaacgttattcatttcatgaaagaaagaaatcaacattaaaattagaaagcattgttttaatttctgaattgggtacttggaatggacattcttcacaattttcactgggttatcataaaatctttattaattcaagtcttttctcccccaagaacatttttctattaaaaaataacaaccaccaccatgaactttggtgtggaggggcagtgaaaagagtaatagtgagagggagagagagaaagaagaatccctgtgggggtgcaacaagctgctgctaaatttcagttgcagttgtcagagttaaagaaaacattggagaaaatgtctcatcaaggggtccccggatttttctgctccgggaaggctgcctgagggatggatcgcggccagctggcaggggctcagacgcctggtactgtgctgcagccactgagctcattggctccacctaagtcattttacagtcagagctgtttcaagatcagcacacggcactgtacagatgtttggggtcggggaggagtagaatttgtggaaggaagaagtatatgcttagttttaaaggtttcattctaggacctctcagggttctggtgaaatggatcatgtgagagtgggagcacagctgaccaggctaggcaggacagccctgtgaggcagtcttgattttacagaggaggaaaatgaggcacggagaggttaattaaccttttgagtgtcgcagtctaaggctcagaggcacagttccatcccaggtctgtctgaatcccgagtcctcactcccgattcaccaccttactccactgctgagaccatccctgtgagtccggccactcagtgagttaaggaggccaatggccatgtccccacggggacatctctctcctcctgagagtctctctcatacatctcaaatctgagatacagattgagaaacaccccaggaaatccactgcatggaaggcaaaacaaccttgagccacagcagtgaccacaagcaagagaagcctggctatgagcacagtcatgatgtagttcaaggttggggaattcaaggcctccatgtccatcccaacatcttcagctcctcctcacgtcgccagtggatgtcctctgcaagctgatataaattattttcaaacccagatatacattcttgacttaattccactctcctcaaactcgcccacggaatgcctctaacagaggggagcgagggcacaccctgggaggcccgagtatgtatcctgtggcattacatctcaaaaatgatatttactcaaagatgctagttttaggtaaaaataaattattcaaatgtattgtgaaaatgttattggttttttgtttgttttgtttttttgagacagagtcttactctgttgcccaggctggagggcagtggcacgatcttggctcactgcaatctctgcctcctgggttggagcaattctcctgcctcagcctcccaagtagctgggattacagccatgcaccaccacgcctggccagtttttgtatttttagtagagacggggtttcgccatgcttgccaggctggtcttgaacttctggcctcaggtgatccacccacctcggcctcctagagtgctgggattacaggcgtgagccaccgcccccggccatgttattggttttaatatgaaaggatctgttttccaaatctttgggtgagattgaagatccaggaggatatatcttgttgatcatatggcttgacataagtacccacgcagtactctgatttaggatccaggggtcttccaggtcgaattagcattttcaggggtattctgaatgcccaaaagagtgactgacagggacttttcggtaaaatgaaatatctcatattcagggtatgttcgtgcatgtactctttctgttatgtgatttccattgtctacatcttcattaattctaagtaggaaaatagaggctggggaccatgtccttcctggcatcactcttgtcaggccctgtgggtgactgcttgcctttagcactggtgaggcccgctgtggggtgggagaagtctttaccgtcatcagtgacaatgactagagtcttcagtgtatgattcctgccatctgggagtctccataaaagcctcaaggccaagagggtctccaggacttccagctcagaagtcccctttcattcagtgataaggagaagataaagataaacatgtggcctgggcagtttcactctgtgtgatggaggcagcttcactccttccccatccctgtggaagcagctgaggctctggagcacaacttgggctgagaatcaccctcttcttcctggggccgtgactcaagcagacaccgtggtcagccttttgatgtgcagctacgtggacaacacttttcctgagcaatcatcccctcttttctcatctgtttgggcacagaattattggtgaacatccttcatcatcaaagagcgacatctgagtgcgtcttcagtggtgttctctggagataagagcagataagagaacatcatgcttgccactgcctgatgaggggacgttcacctgcacctattaattaaaatagaagacacccaatgggcattgggcaccaggggctgatgtttgtattggaatataaaaaagagacttagacttagctttctcttggcaccagcatcactattaacacttactgtctgtcaccaatcagcaacctattcccagtataatctgggacttctatagcacagctcaacccttccacctctctgagaggagtggtggggtagcccttctcctgacagcaggagcagatcgtactccctgggacccagttccccctcaaaactcattcaggaatcatcacacatcatcgctggccacatctaggatgtctgaataattgtggttataatcgatagtgtaaaaaatcattagttataggtaacatgtatggcatttaccatgtgccaagcaccttttatagtactttacacttagtaattcacttaagcctcacagtagccctacaaggtatattttcctcattttacagaggacaaaactgagccacagtagttaagtaacgagtcaatggcagagctgggattggagccccggcagcctgctcatgcttgctatggactgaatgtgtcttgcttcaaatcccagagttgcagccctaacctccaatgtgatggctgcatcatggggccttgagcagataactagggttagctgtggtcaggagggtggagctcttgtgttgggattagtgcccttctaagggacagcagagagcttgatcacactctctattcatacacaaaaaggagcacatagtgagatgggaggtctctgcaagccaggaagaggtgcttgccagaacccaggcatgctggctccctgatcacagacttccaacctccaggactgcaagcagatacatatctgtggtttaagtcacccggtctatggtgttttgttgtggcagcccaaggggacgcagatgatgcttttcaagactgtgcagcccctcctggaagctttagctccttggccttgcaagaaacacttgctggtcactgtctttggtcctttcagaggcccttcctcagcggtgcctccaccaggctcctgacttcatccccctctgtgggaggaggggtgagcaaagtaccttctccctctgctgtgggaagcatgagtaactcacagatggtgtcagagggcgtgtgttcaggtagtgcagccagcagtgagtgaatgaaatgaaatggtgtctgtctgttccaaggctgggctctgcaggggcaggagaacagctttagtctctgcatccctgcaccttccacctgcagatgccagcgggccattgcaggtgggaggggacccatctcagggctcctcattcagatggtgacaaggtgaggtggccgtccaccctatctttatcagtatctgtcctaaatactgcgcgttgacattgacgctaatagtctgaattatcaggggtttggcaatcgttaggcatccaatttttctctcctggacgggcatacctttgctatgtcagcacagtgcctctcttggctttctatgtaaccacaggaagattgcaatctagaaatagtgattgttaaaattgcctataagtacacaatataaacaatatgccagagacacacaggcccccagcataattcctggaagctgcagtctcacctctgccagagaagagccccagcaaggattgaggctgggcatccaggtgcctctgcagcccttcccgtggctccagctggacaattgcccctgagacacggaagatagagactgcacgtgtgtcttcagtgaacgttgctttatttatgttgttgttaaaagtgaaagagagtacaaactgccttttttttctgagacagggtctcgctctgtcacccaggctggagtgcagtggcaagatcatagttcactgccgcctccgcctcccagaatcaagcaattctcctgcctcagccccccagatagctgagactataggcacacaccaccacgcctggctaatttttgtacttttagtagggacagggtttcaccatgttggccaggctgatctcgaactcttgacctcaggtgatccacctgcctctgcctcccaaagtgcagggattacaggtgtgagccaccgctcccagcccagactgcttatttttaaaccacacagtactcgttttaaacctgtcccatttttaccttggaaataaaagtcgcgtatctcaggggcgatatactgtttctctgcctggtttcccacgtcacgacctgtggagaatggcctaggaaccacctgtctttacatccagataacagcttcaggaagatacagcagagtaggacaggggtcgttctgggtgatgtaaagtagctatttggttagaccaacattttggtctctaaaattgggtcctaaggagaaaaataggaaattaaaatgatcactacctgaaaaagaaaaatcaggtaataatttgagggagtcaagggcctcacctttctctcaaataagtaggcaaagaacagtaacagcactccccctcctcacaccctgtttaggaaaattgggaaatgtcttcttctcactgcctgcctgtttatttaacaatgaacaagagtttaaatgttaccaccaattcaaaccaaacacaccccattctctatgtcctgaatggagagggagtctagagttcttgtttgcttcagggtttcctttctggagctttatttatttattttttattttgtttaactagtcaagggcaagggcagtagtgagaagtggggaaagagaagaaggggcagttggatctgtacctgactgtgaataaacagtggaggtaactcgctgcctccagaccagcctcctctgtagagcttgtaaccttgggccatcctgcaaatcagtggagagcagttgcttcggtcctgaatagctcacagggtggtgggaaggtttgccagagttgtcccacctcatgcacactccctttcccccatgagccactggagtggaaacagacaccataccaagtgctgctgaggatgtggagcaaccggaatgcgcctgcacttgctttattcagacagccactttggagatctctttggctgtgtctaataaagctaatcacactcttcctgtatgatagagcaaccccactcccaggtgttgacccaaaagaactggaaacatatgtccacacgcaaaaaaagacttgtagaagcttgtaaatagcagccttattcttaataataggcccaaactggaaataacccaaacatccatcaacaagagaccggataaacaaattgtgatctattcgtgcaatggaatacgattccaaaactaaaaagaatgaattacagatatgtgcaacagcatggatccatctcagagacatcatgttgagtgaaagaagccagattcaacagaactgtactctgtcatttcattcatatgaagtttgagaacaggcaaaacttagctatagtgatagcaggcagggcaggaactgcctattgagggtggagattgaatgaaaaaggcacgggagggctttctgggataatggaaatgttctatattttgttttgggtggtaggtagacaggtgtagacagttgtgttaatggctgaagatctgtgcattttagcatatttaaattataacccccaggaagcattgcctcatcttcctgggggatgtatatgcttgttaagagcatactgggggtgcttttgagaaccccttaccatgttattatgttaatgaaccaccactaatttttgtggtttcaaaatagcaaggttcattgataaaactcccttgtgccttggtgacaaaaaacactgataccgcccactgtcaaagtaagtgtgtttgttatttttgtttttaatgacactaaatttgtaggaatgatatttttaggtggttgctcaatctcacccgccatcagttgcaggtgacagggatgttaagttggcagatttttgtgctagaagctgtgggtttacatctcctttgtgcaggtgtcctagacataccagtggcttgttatttaaacattgggatcgggtgtgtgggtggtttttaagttatagtagggatgcaggtgctgtgggatcgcttcattgtttaacaattcctttgcattcacacagggcttctgaaatgagtgctagtagaatcatcttcagaggatgtcccaatacgttgaactgagatgccttcctgtttgctgtggaattaagcttaaaattgacaccaagctctaggcatttcgtacagggagagagtgggcatgaatgatttcgggaaatgaagaactagatttcagcctggaatttgcttcctccctcctgtggcaaattagcgtgggctcactaagcacttcatctggccatggtattttctttttcttctttttttttttgctcccagatagggtcactctgtcacctaaactggagtgcagtggcacaatcatagctcacttcaaccttgaactcttgagcccaagcgatccccccaccttagcctcccaaatttctgggactacaagcgcactaccacacccagctatttttattttttgtagaaacagggtctcacgatgtcctggctgatctcaaactcctgacctcaaaccgtccttcacctcagcatcccaaagcgctggaatgacacgcgtgagccaccacgcctagccagttttcttttctgttgcattgcagagttagggccaatttcattcatcctgcactgatatttgccttcccagcagatgatgggtgagctcagcacacctgcacctcagccaagcctttagaggggagcacagctctttattgtgtcagcgccacacagccaccctgagcaaataggtttggaatgtacattgccatccttcctaaaaaggttcatagtaaaaagagaaggagatttaccttttgacatgcacgctcatgaaaaccaaggttttcagaaagccaaacctcaaaaacaatacaaagaagctcccttgacgtttgaatggaaagaaattttaggaggcaacactgaggggcaaggagggctgagaagagaaggtggcaatggcaactgcaagggttcttccaaatccgattgtcctgacaggttttgttttattttgttgttgtgttgtcgatgctgggtgggaatggattggaaaaattgtcccctcctgtgtttcttttcgtcttttaactttacaagtgctcctcattttcttttacttacaatttgaagttggcactggtgttgctgggccaaccagcatcttgaggactcaactctctggctgcaggtgctgtggggaaggggcagacttaaattttcttctgtaaaatggggacgggggggattaaataaaatgctttatgggaagttctggcacagagtgacgcacgaagaaatttgagcttccttctcctcacaggtgaactgttgctgctccacctttattacatcttttcaaatccacgccacattggggaacacaaactgaccttatgtagccctggttactccagcctttttaaaaaaaaaaaaaaaaaaaaaaaagcaagggaaataggcaagacggccaaataggaacagctccagtctgtagctcccagggagatcaaggcagacagcgagtgatttctgcatttccagctgaggaacctggttcatctcactgggactggttagatagtgggtgcagcccacggagggcaagccgaagcagggtggggcgttgcctcacccgggaagcacaggggattgaggaactccctcccctagccgagggaagccgtgagggactgtgctgtaaggaaccatgcattccgtcccagatactatgcttttcccatggtcttcgcaaactgcagaccaggagattccctccggtgcctacatcaccagggccctgggtttcaagcacaaaactgcatggctgtttcggcagacaccgagctagctgcaggagtttttttttttcataccccagtggcacctggaatgccagcaagacagaaccgttcacttccctggaaagggggctgaagccagggagccaagtagtctagctcagtggatcccaccccgacggagcccaacaagctaagatccactggcttgaaattcttgctgacagcacagctgtctgaagttgacctgggacactcgagcttggttaggggaggtgcgtccaccattactaaggcttgagtaggtggttttcccctcacagtgtaaacaaagccaccaggaagtttgaactgggtggagcccactgcagctctgcaaagccacagtagccagactgcctctctagattccccctctctgggcagggcatctctgaaagaaaggcagcagccccagtcagggtcttatagataaaactcccatctccctgggacagagcacctgggggaaggggcagctgtgagcacagcttcagcagacttaaacgttcttgcctgccggctctgaacagagcagcggacctcccagcagagcactagagctctgctaagggacagactgcctcctcaagtggattcctgacccctatgcctcctgactgggagacaccacctctcaacaggggttgacagacacctcatacaagagagctctgactggcatctggcgggtgcccctctgggatgaagcttctggaggaaggaacaggcagcaattcttgctgttttgcagcctctgctgttgatacccagacaaacacctccagcaaactccagcagacctgcagcagagggacctgactgttagaaggaaaactaacaaacagaaaggaatttcatcaacatcaacaaaaaggatgtccactcaaaaaccccatctgaaggtcaccaacatcaaagaccaaaggtagataaatccacaaagatgaggaaaaaacagcacaaaaaggctgaaaatttcaaaaacgagaatgcctcttctcctccaaaggatcacaattcctcaccagcaagggaacaaaattggatagagaatgagtttgacgaatggacagaagtaggtttcagaaggtgggtaataacaaactcctctgagctaaaggagcatgttctaatccaatgcaaggaagctaagaaccttgaaaaaaggttataggaattggtaactggaataaccagtttggagaacaacataaagcaggaaagatccaaaattgacacccaaacatcacaataaaagattacattaaaagatctagagaagcaagagcaaacaaattcaaatactaggagaagacaagaaataagtaagatcagagcagaactgaaggaaatggagacatgaaaaacccttcaaaaaaatcagttaatccaggagctggttttttgaaaagataaacaaaataaatagactgctagccagactattaaagaagaaaagagagaagaatcaaatagacacaatgaaaaatgatcaaggggatatcaccactgatcccatagaaatacaaactaccgtcagagaatactataaacacctctatgcaaataaactagaaaatctagaagaaatggataaattcctggacacatacaccctcccaagactaaactgggaagaagtcaaatccctgaataggccaataacaagttctgaaattgaggcaatagttaatagcctaccacccaaaaaatgcccaggaccagacggattcacagctgaattccaccagaggtacacagaggagctggtaccattccttctggaactattccaaacaatagaaaaagagggacgcctccctaaatcattttatgaggccagcatcatcctgataccaaaacctggcagagacacaacaaaacaaaaaatttcaggccaatatccctgatgaacatcagtgtgaaaatcctcagtaaaatactggcaaaccgaatccagcagcgcatcaaaaaacttatctattaccatcaagtcagcttcatccctggatgcaaggctggttcaacatacgcaaatcaatgaacataatccatcacataactagaaccaatgacaaaaactacatgagtatctcactagatgcagaaaaggccttcaataaaattcaacacctcttcttgctaaaaactctcaataaactaggtattgatggaacgtatctcaataagagctatttatgacagtcccacagccaatatcatactgaatgggcaaaagctggaagcattccctttgaaaacaggcacaagacaaggatgccctctctcaccactcctatttgacgtagtattggaagttctggccagggcaatcaggcaagagaaagaaataaagggtattcaaataggaagagaagaagtcagattgtctctgtttgcacatgacatgattgtatatttagaaaaccccatcatctcagcccaaaatctccttaagctgataagcaacttcagcaaagtctcaggatacaaaatcaatgtgcaaaaatcacaagcattcctatacacccataacagacaaacagagaaccaaatcataagcgaacttccattcacaattgctacaaagagaataaaatacctgggaatacaacttacaagggacgtgaaggacctcttcaagaagaactacaaaccactgctcaaggaaaaaagagaggacacaaacaaatggaaaaacattccatgctcatggataggaagaatcaatatcatgaaaatggccatactgccaaagtaatttatagattcaatgctctccccatcaagctaccattgactttcttcacagaattagaaaaaaactactttaaatttcatatggaatcaaaaaagagcccatatagccaagacaatcctaagcaaaaagaacaaagctggaggcatcacactacctgacttcaaactatattacaaggctacagtaaccaaaacagcatggtactgataccaaaacagatgtgtagactgatggaacagaacagaggcctcagaaataattccacacatctacaactgtctggtctttgacaaacctgacaaaagcaagtaatgtggaaaggagtccctatttaataaatggtgttgggaaaactggctagccatatgcagaaaactgaaactggaccccttcctcacaccttatacaaaaaattaacttaagatggattaaagacttaaacataagacctaaaatcataaaaaccctagaagaaaacctaggcaatgccattcaagcatagacatgggtaaagactttatgactaaaacaccaaaagcaatggcaacaaaagccaaaattgacaaatggatctaattaaactaaagagcatcagcaaaagaaactatcatcagagtgaacaggcgacctacagaatgggagagaatgtttgcaatctatccatctgacaaaggaccaatatccagtatctacaaggaacttaaacaaatttacaaggaaaaaacaaccccatcaaaaagtggctgaaggatatgaacaaacatttctcaaaagaagacatttatgcggccaacaaacgtatgaaacaaagtttctcatcatcactggtcattagagaaatgcaagtcaaaaccaccatgagataccatttgacgccagttagaattgtgattattaaaaagtcaggaaacaaaagatgctggagaggatgtggagaaataggaacgcttttacactgttggtgggagtgtaaatgagttcagccattgtgaaagacagtgtggtgattcctcagggatctagaaccagaaataccatgtgacccagcaattccattcctgggtatatacccaaaggattataaatcattctactataaagacacatgtacacgcttgtttattgcagcactcttcacaatagcaaagacttggaaccaacccaaatgcccatcaatgatagactggataaagaaaatgtggcacatataaaccatggaatactatgcagccataaaaaaggatgagttcatgtcctttgcagggacatggttgaagctggaaaccatcattctcaggaatgatggttagttagcaaactaacacaggaatagaaaaccaagcactgcatgttctcactcatgagtgagagttgaacaatgagaacacatggacacagggaggggaacatcacacaccaggacctgttgtggggtgggggactaggggaaggatagcattaggagaaatacctaatgctaggtatttctaatgtaggtgatgggttgatgggtgcagcaaaccaccatggcacgtgtatacctatataacaaacctgcatatgttctgcacatgtatcccagaacttaaggtataatttaaaaaaaaaaaattaaccttttctagtttgtcaccacattcgtggacagctagtcctggggcactggggtgcatatgattagtggcatggctgaagctaatgcattcacaaatcctgatccgcaggtgcatgggtgtcccttgttaatgcgcctagtctgacccagggcagtgctgcacagctcattggctttacagtcagacaaacctccaatcctgtgtctggctctcaccagcttgtgtcctaatgaatcaataattctacccacctgacgctcactttcctgtaatttactgcagtgagttcctaggcatatggcatgtaaatggtcagtagatcaccttagaaggatttcagactctgggtctcagtccatctgtgaaaattaggatggtaggaacctctctgagatacacctttaaaattagttatgtgtgtcacattcacagctcctagttttgaagaccagcaacagaacaatactttcaagtcttcatataacctttattaatttaggacaggcttcatattttcaacaagagaattcaaagttcattttccttttttccctcagcaactaaagttctgagtttcataatctgtttcttattgatacataatattttacatatttacagggtacatttgagttacaatctattttaaatgatacattatgtaaagtcactgtgttcttaaataaatacacatagtgaatgatcctgcatgtatccccacaagtacagcttgaacaagtccatcttccaggggccaagcaccacctcaggcatctgtagcatgagcaaaacccaaggtcccctctggagaccctgtttaccctgcaggcaggacaacaggagctggaaggagcaggctgatccaatccctttcttgtggttttcttggttggggagagagagttgagttttgccaaaatacatgtgttctgtagaagaaacaggaaatggagatacacaaagagatatgacaatacaaatcaccagttgggccacccagatcctggtttccatataccgttccatgcattgttcctgagcatgtaagcatgcccacacttgaaggaggcactctcaagtccatcggggcctgggacaccccactgtttttgaagtcctggaatgtttttgtaaaggtaaggaaataccaaaacgagactacaaaaatgatggtatctactgatatgtattgacaaatgtgtaataaagatgtgtacgtgtgggtgtacctcatctaggggtgacaccttcaagtttaattttgaagcttgggccagtggtgcttcctttcccacaaccaccatgacagatcctctatgagatgttatcacagaacccatgtttctcagtggcagtagaatacgacatctctgtcaacaaatataattctacattactttaattgcttgcatggaaatccgttgtatgtaagtgccatggtacatttaatagatcttgtcctgggacatctacttctggtttctttgatagactagcactcttgtgaatatcattgtacttgcttctttgcatgttttcttccttccttaggatgaattctgagagatgtaattgatggggcaaaatgtactcacacatttttaagggttgtaaacttttcggtcaaaagctggtactcttggttgtttgaaaaggaaagcaagtcctcccattccagggttggattttgactcttttcctgtaaacttcactgctttttggtttaattgtcataaaatgccaagcaccaccaacagggctatgggaaggggcccagaggcaggagggctgtggttaggcatggctttggccagatggggaagctgggtgcttgggatcagggtaagcgggtggggatgctgtgagtatagacgctgggcagggaagccctgcagggcagagggagcggcagggctgcagtgcatttggccgtccagctggagcagaggatggaaaccgaagagtgggttgactcttggatgccaggcttgagtcaggtgaatcctgccctcattttactgtataaagggagctactccaggcctccaggagtcttagaccctcccagtccctgtgggggtcccacaggtggttaattgtgcctcaggccctctgctctccctccctctgtaagtctcactctcctttgcagtgagctctagcgaaacttctattccagtaggaccaaatgtttgaggcctccagaaaagaaatccggtgaacacggagggtttgtcacactaacttgagtccctttctcaggtggcccacccttgtaggccagcctcccaattcctagccagctccaggctccgggcttttgctcattcaaaaccaaaattgaaggcatctgccctgctcaggcccccatctctgttcagagtaaactcctccctccctctgcttttgccctaagttctcttttcaactcacctaacatctaacttggccctgcagctctgatccccaaaaccctctctacctgttccctcccaagctatccctgaccagcatgccaggaacaaggaagtcttggaagctgcactccttgctgctctcccctgtcctttatccttccacttggaatctctgtccttctacccatctctagctactgaaatcgtgttcatgtttccaggcacatctcatactctgtcgtctttaagaagtcttcccagaaaccccatcgtttatattcgtgatatataccatattccactgtgtaatgtagattgcaccagagagtatttaatctcctgaaggcaaggactataacctattcatcttcctttcctgggtggggagaaccaccatgccttgtaccaagtagcgatgacatgggtcctggctccatgaatgaacgggcattgagagaaaaggagctgatgatgagtgaatggaggagcctagtgaggcaacgtttactcctcagtgaagcagtgttggtgactccaacagctctctttaggaaggatttaagacaacatcctgttcggaaggggcttgaagcactttataaaagagaggcaagggcacacgtcaaactagaagaatgaaagtaagaagagagaaggctgcagagaggagcaagccccatccgtccccctgatggtcctgccagtgcatgggttacctctcattgcatttagtgcggtctgttgtttttgtgttgtgaaatattatccttgattacattatgttgctctgtttttgaaagagaaagtattcaagcaagtgtcacttctatttcttgcaggcaactatggtcctgagctccgcacacttctggttgggattatttctggttcctactgcctgtttgattgaagatgtggcatggagagcgtaagtttaacagtgaagcggggaccctaagtctggctcatctgtccctggaattgtctttctcatgagtcctgctacagggtatgagaatgacaggaattcggaagaaatgggtctcctgccacctgccagaaatgaaaaaaaaatttttttagtttaacttgtgcttcatcttgatatgaaaatatagacaaccataacaatagaaaaatcagctgggcatggcagcgcatagctctagtctcagctacttaggaggccaaggtgggaagatcactcgagcccaggtgtttgaggctgtagtgagctatggtcgtgccactatactccagcctgggccaacagagcaagaccctgtctttaaataaaaagaaacaaaaagaaaagaaaaaatacagacacaaaggagccctgagagaaactatgaagatcaataggaatgttgccttatataaaggcagagtttctgagtacacacccattccatcaaattgagaaagtataactcaaaactcatctctctttatatcataaactcagtgctaagtggtcacggatatggcctggcttcacttcccatgcttagagggaagctatgtataggtaagtcatttaaaattacaagaatgaagtactcttcatttttccaaacaactcatagtaggaatactttcagtaaaattcttctagaggattagttcacaggtctgtgagaaaaccagtcatgaagatggcattatcatgtaggttaaataggaaatcattcatattaaattttgcttttatgttttaacatatattgttttcaagataccttgttacaatataaaagaagcgactaagttccaaggtcatgtaaattttaattttatccatgagcaaaaggagggctgctccaagtaaaataggactgatttttgttttgggtcgacccaatttctcctacaaataggtgccaacttctctgaaaattgagactccgagctcggctttactttgggcaaaacacaattattttggggctctgagatagagaagtgagactttaatccaaaccttccagggaaagacatcagatttcatttttagccctccgttcctcccacactcagaatttttcttgcctgacagttatggaagtcttttgaaaaagtcctcattttggcattatcttgacaaccgatgatacctcatgcaaatctagatagagggggaaagaatattataacatggattttctttttttttcctgttcactaagttttttaactgttaaaaaattaaataattctcatttcttaaattctttgatttaccattacttccattttatttggtaaaaccatattctgcaaataacagaatcagaatcctcagaaatgaaaagattacagccagaaaaaaatattttcttaatctaatagatgtaccataagaacatagtagttttggccaggcgcagtggctcacgcctgtaatctcaacactttgggaggccgaggtgggtggatcacaaggtcaagcagtcaagaccatcctggccaacattgagaaactccgtctctactataaatacaaaaattagctgggcgtggtggcgggcacctgtagtcccagctacttgggaggctgaggcaggagaatcgcttgaacctgggaggcagaggttgcagtgagctgagatcgtgccactgcactccagcctgggcgacagagcgagactccgtctcaaaaaaaaaaaaaaaaagaaaagaaaagaaaaagaaaaagaaaagaaagaaaatattagttctgttatttgctctttcagccaataggcccaattgtgacacaatctagtcccttgctgaatttgttcaaaatctttgttttgcaaagataagtcagttttagataaataggccacatcagctggccttttctatttatagtgattgaaaactagtaacatgattataaattagtttattttaattcagctatctcaaattagtgtcattaaaacaattctattgagactgtatatttgcagaagactttagcaatagtctcttccatctgaaagagaatgtttatagattacaaagtgtctgtgcttctttgtccattttctggctcttttccagtgcgttctgagtaatcattccctgtcatcacaaagcaaattatctattccctcaaacaggacttgtttttggtttcccctggcactataaaattagcaccatttacattttaacaaggataaatcaaatgacactactcccagcttcaccacatggaaagagtaaaagtcacttcctttccaaggagcttgccaactgggtcagagcataaacccgggctctgcagtggaggtgcccgcagggcaagcaaggaaggctaagggtcgtcactctgcagcaggagcactcggccacccagcacctggcaccacgggcccagaactcagcttttccggggagccaacagcatctcagctctgggctgagccagaaaggcccctgctgaattccagaggtgctttctaaaatggatttttgtcttgttttatttaggggagcagggaaaatagcatatattggctgtgagctggaatatttgtccgaagcacatatatgctcaatttgtaatatctatttaatatctaaactaccctcacccctctcctcaaaaacaagacatttttcagtttattggtgcattttccctttgatcgtgaggcccatattatgtctcatattatgctccaaacccgaagtatttgtttttgaggcaagtaaattcggaggcttctcacaaaaagagaatgcctattgtgaatcagttacctctgagaagctacagtgcttcactgagatttctctttctgaactgcagctttagaaaacgctgttggcttcttcttcccatgcactgaacaaaaatattaatcctgcttgtcccgaaccacccatccttggatttgagttgtcaagtatctactgaggcacgatatctgtgatgcaccttggggttcccagaaagggtgtgtatttgagagtgggcacaggggcagctgaagaccctaccctgtgatggcagcatgtggtgatgccgagagagcttccacaggggtgctgcgggcctctcatcttgccttgggcccatcttaaggatgttttattttgttctgaactttggtggttatcactctcttttgaaagggcttttagaccaggcacagtggctcacacctgtaatcccagcactttgggaggccgaggtgggcggatcatctggggtcaggagttcaagatcagcccggccaacatggtgaaaccctgtctctacaaaaatacaaaaattagttgggcatgatggcgagtgcctgtaatcccagctactcaggaggctgaggtgggagaatggcttgaacccaggaggcagaggttgcagtgagccgagatcgcaccaattgcactccagcctgggcgacagagtgagactccatctcaaagaaaaaaaggcttttaaattccagattaaggcaggcctgccttttcaagtatatttctgtgagcactgaagaaagtgagttgctccatctttctacattttccccatttctttgcccagtttctcgcttccatttcaggacctgagctgttaagagtaagaaaagagaaccagaatgaggtaattcaatcactttttccatgaagtctgtcagctttctggatgaagatccattattagactatcttaagtcagatttggcacgccataaaatgcctacgctattatcctgctaaccaaaattttcatatgggacaaaactaagctaccttttattaaaataattgattgattatatgtgatacctggctaatgagtaattttgttagatgcatgaagtttaaattgcccagaactattttaatatccctgcgcttatattcatccaaaatgtttactgatgacagcatgcttaggtaagctgccacatacccactttcatctaggtgaaatttgttagtattgctttataaaaataatacaagctcaaggccactgaacacagaggaacccatttgcttttatctagctgtatctcctgtattttactgtacatcaacaatacagtccccgattccagaatgacttcatttccttattataatcccagataggcagttaaatggaaagaagaggtaatgagcaatttctatacacaaatgggccttgatttcttttaactttctaactaaactaatttcttttgcagcacgttacatttacacttccatccaggtttagaattatatgtttccttttgacttgctgttcttgcatacaaaagaagagtccagggaaagagtttcagaaaaaaaaaaaaaaaaggatggaaagttcaagatccttaaacagtctatttcttttaaaagtctctgagaacctggagacacccttaggtatatctgaagacccacagacaactttcacactcttgagtcagtagccagcaccccaactctgtcccttctgtggtcatccagcctctcgatgtggggttagatgaagcaagccctggaccactgggcaataagccatttacagataagggacttactctgtcaaagctatgactcagaacacgccaaacgccagctcctggtaagacctaagtgacatgccagtggctaatgcttaacaactgactttataacctataaatattaattttagaccactcacatgtagcctttagacaggggagattttagaatcagtttttctaattcaggcgttattagataaaggtgcttgggaacagggttttaaattgccagcctccctttactcaggtgctgttaaatgcatgcagaaagagaagttgaatcatccccagcattgcaattcagtgttttccaatagcaacaaagttcccaggctagctcacaggggctaaactagtggaaatagtatcaaattgctgagtaactcttgaatatgggcgcagtttcatcccctgagagcacgcacaatgcctgggagcactgacatgctcagaccattgccctctgaggccatgttgtgattgagtaaaaaccagcagcttccacagtgggttggattctgacctaagctgtaggttcccagtggccaaccttcctattccagcctcccacttaggaaccccctttcctcccagcctgggaaataacaatggggtctgttctacccctgtgcaggggaaaggggatagggagagagagggagggtgatggtggagagagggatcctggaagaaccagcgatgctgctcatccttcaggagtagccaggctgttctaggacccatgcaagcccatggctcagggcaggcggggcaggcactcggtggctttgttgtcagtctaaccccagaagcccaggagataaaagaccacttttggggccccacatgttacataataatgaacggggtacattttaacatcgtttttgactctcctttccagcaaactgttagatatttgctcatttcttgtttaaattaaaattccacaggctctgctttgaactgcagtattttatcaatcctgagtctcaggacactgtttgatggaattaagtaaggtattatgtgttaaagcctgtgtggctttcccttgtttactttgggggaaaggatgacaggggcatatacagtgtctcagtgctaatactccattatagattaactcggagtgtcgggagatggctcacattatcttaacaggctttctttccttgaaggtggagggtgggtgaggtggtacaggattctgcaggaagagcccacatcttcagaatgttcccatgacaccgttttcatttctgggcaaaggtgctcagtttttgttctcattctgtctttgggtcctggtacatagcaggatcctcacatgtatttatatttaaattaaaccgatgcaaagcttttcagtctggtgtgttactaatttttgagccttttccctttgcagtttttttctcttatataacctatatctggttaaatgtcttttcacctagactgtttccaactagtagctagattgtttccaactggtagctcacttttagcttagtttagttttcattttataaagactctgagattggccaattatttgagcattgtgaggtattcatcttagtgtcctcagtaaaagggtagagggaactcttcctaccattcaagaagagtgagctgtccaggctgcgggttatttcataagttgtattaatgtcactgaggcctgcgtgtgtggactccaatggtgagttgttgccagaggaagatgggaaacctgcactctggatttgtgttgactccacgtttcaagcctctggttttgcatccagaccatgcactctagcatcctaagccccgtggctgctgtggcagtggctcttttcacgctaaagagggagggaggaaacttgctaacccctgggctctctgactgcagttggggtccttggaccagggaaccagtgcctgttcactaaggtgagggtttaaagtgtcttcttggttttcagttcctgacaagaaatgctgtagaggtagaccctgggtcttcgtgaaccccacccagtctttgagtgactgggctgctcggccgacttccggttctttgcggggtgggggtgactcttgacatgcatgatccgggtctggtctgcagcactcaggatacttccgggctgtggagatggaacctgggtcatgcatggagactgtgaaagctccaccacttcccgagcctcggcctccaccaaagggcatttggctgtggcctgagaggggagcggcctgtctttcccagctgtgtcaagtctctatgccatgttcgttttgtcttttcctcataacacagagccaagcacacctgcaaaaagacattgctggaggaggtgcaggagctggaaaccaagtctcgagtcctgggaaaagcggtgctgcgggatagcaatggaaagaggtggggaactccgtcccagtccgcacagaacacaggtgctcccggcccttttcccttattccttcctgtatttctttttctcatcttggttttcgatgggagcacagtatgctcaggcttaagaattttggttattctcagatttaaatcacactctcagtgactacatgaaacctaaatctctggaagtctccaggtaagactgggggttttattgggtttagaagtgagcaaaacaactcatgtgcagaaaatcgatgttgtggcagtattatcttaaggtggaagagtccagagttagcagtattaccacagaggagttaaagctaggcctttgaatttcaaacccaagtactgtacccaaggatgagtatctacagtgtgaaggtttgcatgtgaaataatgcatgttgttattcatgtaaacctgttacattccacttcagcatatctaaatgggggagtagtttttaatgctaacattttctgctgggagtgaaaggaatcgtgtgaactcctggaacagacactgccgcttgctctcctaattcctcctgaacatgagcctgcccttccccacaaggaacagctgggtctgtgtgcagtttttgtttcatcacacaagatgttaaaatgttgttagagtgcactctgttaaaatctatgtaccatcaagggaaatttctttgggcctgagaacaatttgcagggtactagaaagccattgctctattaaggacatggaatatctataatattctgagtacagctctcctataaatgcttagaaggaaatcagtaaccaactgctaatgaaacaaacatcaagaaatcaaatacttatagaggtccccactttgtgttttgctttatattgtgtttatttgtaccatcttttaaagcaatgaagacaaaataatttttttgttaaagaaagagaatgcaaacattttgagaggctttcaaaatacaatttcaaacagattttagaaaagggatgatggcatagagttgaagttgtggttttgtatttatttatgagttattttttagtaagtttattaagcattcattttatagcagctatgctagccactgtaaaaaatcatcagtcaacaagacaaaaagcactgtcttccataagcttaagtttgtgaatacatggggatgggggctgattttaccgcagatgtacatataaccactacgcgtggttgaggcttgttcagggctgttctatccatcagacagctgaggcataaggctcaggacctgttagagtttcagggacctaccgtgctctttgagacctgaaaaaaaacatattcataagctccaaaaattagggagcaggaaacattgcataatgaaattaataaatgtttaaaaccctataaaatgcatatcactcttaaccgttaagtttagtaaggacaataagtttattatacttagaaacaacttacaggctcccttatatatcaagtatacacaatgattgctgagggggcataagtaatttctaagtaaaatgagaatttcagagcaaaactctcaaactcctctcaaacattttacaggacgacatcacatataatgtggtgtgagaatgtgctttagagtgtttgttctgatgtggggaggggtcatctggcttgagcaatcaagaaaggcttcatgttggagatggatgaacaacaggcttttgaggatgggagggtcttgaatggacagaactgctgagagtctgatttgggcagagggagtggcacatgccaaggctcaggtccaacactgtgtgcagggaccaaccacccagtttggagggccacatgcattttgcagagatacagaacctgcgtttgaattctggctttgctacctaccggtgaggccttgtgcaggatatttcatatgatcagattgtctcttcatctgtcatagaagaaggctaatattttctttgggggattaaggttcgtgaaatatgtacaacgcagcatattgcctgacccatctcaggtgtgtaaaaggtcagctgctcatcttcactttggcaggagagtcatgagctgtcggccttgaattgtattgaaggaagtcgtgggctgtcagccttgaaagagtgtgtgagcccatttttgcttgttgttgataaatgaatgttatttttaaaattcacttatcctgttcaaaattcatttttaaatgttcaaatggatatcagaaaataagagcttaaatgcggtttcctaccgtctacatttgaaagtcttattttctggttccttgtaaatttcactttgtagttcatatgatggggtgtgtgtgtgtgtttctgtgcacgtgtgcgcgcacacatgcacgggtgggcctgcatactcccgtttggttgcaccattttccttttcttctagtcccagcatcttgcttcactttggaattcctagccagaacacagtttgggggctctgccgctcatcctcctcagtgaccccctcccatttgtttttctcactcctaattactcacagattttctgggtggtccatctgcaaactggataatggtggcgtgctgctctctgcacagagtctatgctgtcctgcttggcctcctaagctgcctcacaattgttctcttacaacctttgttttcttctttcacacctgcttagattcctgaggggtggagggtagagactaagaagtctgtcttcagctctgtcctcccttctaaagatcttatagacccccacctctttgaggggtcctgagtgtttttgtctcttctcacccctccctgttccttctttcctaccctcatctgatctttcagctgatttgtgtatctctctagctgttaaccgcacaggaaactctgtcaatatttgctggctgactgactggcaataccaaagtctagtgaggtggtagtgaggaaaggacggtgacttcagtgccagatgagctgacacactggtgcctgtgtgtcagctcgtgtgtcggatgtgcacaaagtggccacagagagatgctgacagtcaccgggcctccagggagggggcagtttatctcattgcttgagagtacagctaacatagactcacacatggagaggcatctgtgatgtaagattagcaaatcttacccttgcaaagatgcacaggccaggagcccatcctccctgaaacccactccctctcctgccttcctgtgccagccaagccagggcacccccaggggtcctcagcatccctaaccccaggggcttactcagctcagtcctgacagcattgcttagggccccttaaaggacattctgccaggtcataaaacccaggtccaagtcactggcaaatattctagcagtttttcttaggaatgtaaccacaggaagtagaacaaaaaaaatctgtatgcattaatctttttagaaaaccctcttgtaccaaatttacaattacaattttgaaatggtagccagggattctaagtttctctctgtgccttttattcattcaataaaatattttcatccaacattttattgaacttgtctaagcctcatacttttatactattttgataaagttaaattttcatgaacatgcttctgcactttctcattagtagatcttgtcttccaaaatcaacctgtggaattgatactttaataagcctgttctcatgaagaagcagataatgagaaagggtgagatcagggaattagatatccagaaagcacagtgaagaaagtgctttagggagtgaataaaatgtttgtcttgattttagtttgttcttcttgaaggagtgtttttcacgatgtggtgtttgtgcgccttatagacactggacacgtgtgactgttggggttgatcagaataccttttcccaaactgtcttcccagtaatccctacctggggaagcaggaacccccccgcaccgcacatgaaatagtctaccctgcatgtcgttattttgagtgtctaaacaatgaggagctaaatggaagaaaattctttgttttttaatgtcttggtaatatctttcctttctttattcctgaagtgtaagccatgcaaatttctttcctggtgaaagaaaatctatctgtggccactcacttttacagatacaatataaaccgatgacggcgtgtaagatgacagacttttgttccttaattttttttggaatgagataagtggttgccctgtaatattttaggtacaatggcaagcaagaaaaaaaagggggaatatatttgttgaaaacatctagtttttgagttatgcatagcctgaataaacaaggagagcttgttctatttctagatcacctttcactctgttcatcccagttggtgggagtggggtggggtggggtgagcccagggctgatattctccattgtcaagggtaaacagacccggttgctgcccctgcctttgccaggaaggcagtggattatcttccccttaagtgctttccctgggtgtagcttacgctgtgactttggtgaaggtagctgtgtggctggtcttaaaccttctggcgagccgtcgcctcgtctcccttcggttttgtgttctgtgaacatctgtgcgtggccctgtgacccggggtaatctggacggcccatcaccgccagggaattcaggagggaaacctgactcttgctctgcggcttccatttcatccaggctgcctctaaacaggcagggccctggtcacagccttggacaggtggcctgggatcctaatggagctctctctgccgaaaaataggaacagagcctgaaccacagcagcaagatttcagacaaaccaaagattgttcctccactccaggcagtgctctcgagtgctcctttgaaaaccagtcgtattaaaaaaatgaaacaacacaaactcccgaatgcattctgagtgagtactcaactcaaaaatacctgtcatgctttgatctttaacggaaatcctttgatctttaaaacagtgttgaaaaaactgtttagtatcatcacacctctaagtcaaaatcagtcccactgccaggctgagcatgtcgctgagccagcctgaggcaggagggatgcaggccttttgcaccggactccaacaatgactgcgtcacttcaggaaatcggttttttcacagtactggccgttggcagtgcacatgtggtgcatctcccttttgcttttgtcccacctctcccacactttcctcctaaaatacctattattggctttttttccagccaaaaggataggaaattagggcatcctttcagcaaacctctccaggccaggtggcaaatgtctgcttccagcacctggttgagatttattttccttccagctgcattttttttcctcagctctgtcatgaagcagagaagcgagtgcagacggcggagacagatgacctgagctgggctctagcttagctgtgtggccttggctgggttattaacttctctgaacttcagttttctcatcatacattcgctttgaggtttaaataaataatgcagattaaatctatagcctatgtagatgttcaggaagcgtcccctaactgaaaagctgcataacaagtacatttcactggccgtgtttaccatctaacatgtaagcctggggaagatgtgaatgcagcaggctctccgagttgcatcgtcggggtgtgccccctagtctgaggtaaaagggagaaatctaacagaatcccagggacatgggagtggtgtggacgaatggccgtagtgaatgttggatgggggtgtggtggggactgtagtgagttctgaatcttggtggtctcctcaagacagcctttggattacagcttcaaggagctcctctttgtgaagaggacagtgtacccagtccaggctgtcccttctgccccaggatctctcgccagcttacccctgtccatctgagctgcagtctgtctgtaacgtctatgccggtccttgccactcctccccagaaccagcccttccttcggagtctcctgctccatcgggatgaatttttcccacactgcagactcgctctcagtgtccacactgtcccctcatgtcctgcgcatccctgggtgccaggtctcggcgtcttcccagcatctgcacagtcatcccccctggtcccttggggtggtgcctgtccctcttcacccaccatcccacagctgaagacatcctttgtgaagcacagcctcatcatgccaccttctgccctcagcccaccacctgctgagccagtgcagaccagaaccacagtgatttccgcctctgcttctcttctcacgtgtgcgaccctcagcttccacctcccctgtcctccccacgctgtgcccttctgtggttggtgctacccttggctcttcttgattgactggttttatacgatggtgttgcactgtgtcccaagcactgggccacacgtgggctactcaggggcagcaggacaggccttgtcctgggaacaaatgccgtccacctcaggacacactctctgatgtcaccaacttccctgctgtgctgatggcagcctgagcttcccttaaaacactcattttaaaagttttattttcgaccggttgcggtggctcacgcctgtaatcccagcactttgggaggccaaggcgggcaggtcacgaggtcaggagatggagaccatccatcctggctaacacagtgaaatcccgtctctactaaaaatacaaaaaaaaaaattagccgggtgtggtggcgggcacctgtagtcccagctactcaggaggctgaggcaggagaatggcgtgaacccgagaggcggagcttgcggtgagccgagatcgcgccactgcactccagcctgggggacagagtgagactccatctcgaaaaaaaaaaaagaagttttattttcattattcaaatattcaagcatacatagtagtagggagatgagcacaataagctcttatgaaatcattgcccaggtccaatcattatcaagattcggccagaactgcttcatctcaccccttctgctcagagtctttctttcctgaaacataaagcaaatcccaggcatcacgacagtccacctatgctttaggaggcatctctaaatattccacgagactttataacatctgtgatacacagcatgcttgtttatgttattaaatgtagaactccagtccccatgatcacatctaacaagttaataataattccttggtatcagtcaaacaacccgtccataaaaagactctctggatgcctcagccctgccttttaggattgattgatttgtgttaggatctgggcaaggttcacacatagcatttggtttctgtgttcctcaagttcctctgaatctggagaactttctcttgtttttttgttttgttttgttttgtttttaagatacagagtcccattatgttgcccaagctgggcttgacttctgggctcactccatcttcctgcctcagcctcccaagtagctgggattacagggatgtgccgccatgctgagacctgtcttcctggtttttaatgccatggacttattcattatgctccactttatttttttatcataacactgatccccacatgcagcaaatgaaagtttcctcatgtgcagaaaaggcgatgaggcctcagagagatggagtcacgtctgctcagtgtcacccaactaaagagaggcaaacctgcatcttcttacttcaggcctctttccaccaagccaagatgtggagagccacccaaatgcttgcatttgcaattacatctttattagagagactggaaagccacggagcccccagagagaccaggaggggtgcttaccttctagcatggtctgatgaaaagggtcacagtctgctgtctggtgaagctgcgtgcaaaatccaaggaagctagagaattgtagttgcatgttgttgtcttttagatccctacatgtaggaagaacttggaccaagcagagaaatcataccctccccccaagaaatgctgaagccaaaccagcggacaaattcagagcaaataaagggaaaagagtgtgtgaaagcggctcattttgtttgtttgtttgtttgttttttgagacagaatcttgctctatcgcccaggctggagtgcagtggtgcgacctcagctcgctgcaacctctgcctcccaggttcaagcaattctctgcctcagcctcctgagtagctgggattacaggcacccgccaccatgcccagctaatttttgtatttttagtagagacggggtttcaccatcttggccaggctggtcttgaactcctgaccttgtgatccacccccacccccaccccccttccctgccctcggcctcctaaagtgctaggattacaggcatgaaccaccgtgcccagccgcagctcacattttgatatggctcaggaaagagaagccttgctaaagaagccaatttccacccacagtcaccttcgtggagcctagtatggtctatgaaaaaattaattgaatgcgtttaatcttgtagagcaaagaaccttgggcaaagcctaatgccggcaaacattttagttgagacaatggggagagttcttaggagaacagctggagagccaacgacgctcccaggcaaggccagttaaagctctcgccttgctgacaaatactcgcgacaggtgaggaaatgcattagtggaacaaagggagtgaatgtggcaggaaattaccgaaaggctgcccgcatgacccagccgggcttctggtgactgtttgcatcctgggcacaggaaggagaggaggaggaaaataaactcttcaggaagtgaaacacctcattagcatttagttaatgcctaagctgcctgtgtcaactaaaaataattgattctctgttattttaggaatgttgaattccaagagcctgttgttgttgttgttgttgttattgttcttatggaccgatgtttaataattagaaaatttttaaattaaataccagatgtcatttattattaagcatcttgttcacctttaaaacggtgctgtggctgtatcagaaatctaatcaggagcttagctacttgcccagtgctgcgatgaagaagtgcagcatctttagaaaatgcctggagagaaaatgggaagaagtgtcctcttgatggagggaggtaagtgtggagagaccatcagtgttagcggtttgctagtaacacggcctcaggctgtatttccaggatgacttgagtacatttccttttttgaattatgacttaaattagttccatgtcaactttctctatttgccaacaagactttttttcaagaaccatttttactgatgaatttattctcagttccaaacaaaactagtgtggacagctagctcactgtatccctttttaagtagtgatgaaatattttaatctttttggggaggatagttttatttaacccacttgagcagcaatagaaacatttaaaggtagatttgccaaaaaaaaattgccattgtataggtcacataatttgaatagtgatattatacattccaggcggggattagttcttcaggaggttctgggatctctttgctaatcgcttttctcctgcgttatcagtgagttgtttgcttttcccttcggcttcccgttttgcctacctccaactgtgactgatctctgagagtaagacattccagcctgaaaacaaacaggcaggtacacccatcctaaaattgagttacaatttagatgttatctgggaataaccggattctactgttcatttctcaatgagcctctccctaaattcttacaaaggcgtagagaagaagtgtagactcccaggccccccagcattcagggttaaagtgactttgtagtgcatctgagagaactgctggatccctgggacgtcctggactgttacaggcaaaaagaagactcaggagaggccgggcgcggtggctcacgcctgtaatcccagcattttgggaggctgaggcgggcggatcacgaggtcaggaattcgagaccatcctggcaaacacgttaaaacccgtctctactaaaaatacaaaaaattagccgggcttggtggcgggcgcctgtagtcccagctacttgagaggctgaggcaggagaatgacgtgaacccgggaggcggagcttggagtgagccgagatcgcgccactgcactccagcctgggcgacagagcgagactacggctcaaaaaaaaaagcctcaggagaaatgctggatgttttttattcatatttgatggctgcttttgcacactacagcacagagcatgtcctcccaggcccctgacgtggtctctgtcactagactagtgactagtctctgtcactagtggtctctgtcaccatttatgtatacactagttctgtaaagccagcacttggaaagccagtcaaggtccagttaggtcacgggtgaatgacatcattggccttgtggttgagaggaacttggagaatatgtaaaagttatcaccaagagatggtcattgtagcaggaatcactgcatttagcaatagatttattggatttttggaaacatttctctattaacaggaacagaaaaaaaaattattcttgggtttaaaaaaacctggcatggatctcatgctggtgtatctaagagtaaattcttctgtagaccaggacacgtgaatgactgtcacagagcctggattgttagtgattcagtgagtcccagttaagtcttccttttctaatagggcagtgataatatgattattcagtgtttattctctttctctggcaattaggattggctcaaggccccttaggtggtggtaattgggacttcacagttactaatgagtaaacatgttggcctcatagcaaatagaaccagtgattggcctaatgtggggcgagtcatttatgtatccacgcaacagacatttattaaaaacggaggaagtgccaggccagactccggcctagaatgagagagggaattcctattgctttagagctcgcctggtagtgggagacagtgagtggtggctcctgggaggaaaatgaaccagaggacataacggggagtgaatggctgggctggagcagtcagggaagcctcctaagatgacactgtcggggaagaaaaaagtcatgtcttttcctcatccattacaaggctcatggctgacactcctgtaacaacagtcagagtaatcagagaaaagcgtaacagacttatttgtcaaagttttttgtgacatgggagccttcagaaatgaagatccaaagacccagggaaaaccgtatgtatttttatgccaatgaagaacggacagtcatgcaaaaatgtgattggaagaaaagggggtaatttatcaagcatggggaattcagcaagacctgtctgttgtgactctgggcctctttgtgcagccttccttcccgctgggtgtggggcaggaccactgtggaacgcaggtcttacggcctcctctcagggaaggaaggtcagtgagcaccttcatgactgtgcttcccactgaaaggtagggaggatcagagcaaccctcttgcttctgaggccttctcagtctccttcagttcacagtgctcagggtcatattttctgagccatgacaacatttaaactgagacctaaacaggcagtcaaccaagaggagatctggggaaggaacgttccaggcaccagaatttgataagaaggcctgtagggggagtgggagggatgctcggtgtgaccagtgcctgggaaatgcatgacaaagtcatctaagagatctaagaggcagcaggagccagatcacacaggcctttgtgagcagggtcctagggcattggattgtagccaccaggaaacatttccatgggaggagtttaagcaagggacatacatgacacaaatttttagaatgtgtgattaccatactacttaaaagccatagaatcccattctcaaagttaaaaattgagtaaaatctctagccaggcacggtggcatgcacctgtattcccagctactcaagaggctgaggcaggaggatcacctgagtccaggagtttgaggctgcagtgagccgtgattacagcgtgtgaacagacactgcactccagcctgggcaacatagcaagacctggtttctaaaaataaagaaaaagttaagtgaaacctcaatactgtatataaaaatacacaaaatatttattagtatgaatttatgatatgtgttcaaattaagacatttattgttctaaagtcaattggcgttagcaatgagttgatttttcaaaacgacaaaaattagaagtgagtgttatggaagacagtttgctttatatcatctctatatctagtttacttttgttttgttttgggttgtgttgagaaaagccttgagggataaagattagttgccaagtttgtgttttcatactttgccttgtgacctcagactttctcatttttgttcttgattatatttaactgttgcttaagtatacaagtcatacaaagaaggaaccaacagtttgtgtacacactgtctctgaaatcaaaatagcatcatgtgataattgatctcttgttatgtgactgacataatataacagtcacatgttccacacagacaggaacatggatcaggtaatgcactttgtgagaataggctagttgccagtattattttatgtgaatggacacgtaagaatgcttgtttgaaaaatagcaatatgtaattacaattactaattactaatcagtgacctatttgtaaaatcaaaaataagaacttttatttaatctgagatcctgacagaagcaagttaacttgaaaatatctctggatttcaatatattaagattttatatgtattatatgaaacaattcgtatgttcttatactaattaaatattttttaaaaatattcaatgtataaaaaatgcaatttaaaaacgagtggctgaaagaatagtaaacagcactgtaatcctaaaagcttgtgttaactttacatttcaatttagtcacaaaatacagatggatacattcctgaaaaaatgtgaagtctttagtaagaatagacatttttgagagagtaaggcacatttaattatttaatattatacatttagtttaggaacataaaatgaataatttaaaattttaatgattttaaaggtataatttaagagttgtacatgtgctcactgaatttactgataaatacaacttttcattactagtggaatcaaaaatttttagttctcccatatctatttttttggccagttcatcagaaatactcaaagattttagatgggagaaattttagattcttaagctatttctagaatgatggtggttttgtttctcaaagcattgatctgttgcccagaccttttgcccttcttgctctgtctcacctattcagaaagcacttgctctttaaaaaagaactgaggacaggaactggctgaatacacttttgtcatatggaactttgggcttattgtctaagctatcatcttttcaccatcctcacaaatctgttgaaaactgaagactcgcctgtgacaaattccttttgcatgttcccaatttatgcacagtgcttttcacatgacgcagaagattgcagacacgaaagcactcaaaagcaaagagacaccggggctgggtggggcacaagcttgctgccatgttgccggacaaattggttgtattctgtgatcaaacatctaaagatattctgtacactggagcatttgagacacagtgacatttcaaagtgaaatccaagtgagcttttttatttgataacccagagaaatgcagtggccacacatttctgctccattttggcctctgcttcttggacccataaactatgtgattgcaatgcagccagctggagataacatttctgctgtggcgtcaaggtttttcactttagtttctttggtatttggaaatgaaaatacacctatgccctcaaaaacaatttattaatctttgtaactgtactgttttgcaaaaaatgtctacaaagtgcaccatttgattccagataaataaatttctttatatggatcttcaggcaattcttccattaggcatagcagacatcctcatctatgtgcctcagattctctgttctttttgttccatataggatgtctttttcttcctttttatgtaatattctcaaaggatataaccacatcattccatcaagtttacttcatggtttgtgtcaatgcattattcttgcatttgcttctttctggaacacagcagtttataccatgtttaggttttatgttttctgacttttgttcttttgtagctctgttggagtgagtccaacttatgacatcattagcaatgttttgtaggctctgggatgcaccttctgtgtgtctgctttgattttctgtgctgccttcatgatagtgtccacagaaaataattttacattcctaaaactgatatatattcagcaacatttttcatttacttacaccatgaagaacaacaacaaaagaaaatgaagtaacaacagcaagtgaaaaatcagataatagagctagcagtaaagtctgtaatttgttctcccaaaactttgttcacccaactgagaggagcacagaacataatgcacctggttttgtcttctacaaaccattaaccattgacattctaatccttaaaaaaaaattgcacataatacctgctgagcaagtagcattataagtttttaaaaatgcctgtgagtaggcatatcctgttgtagagaattatgttctaaaagtacatttcctttatagaaccttggtgagttttctccctaatcttcaggggtcaacttggataaaactagggtttctgagaactttccaggcatggttcctttcttgtagttgtgaacttaaaggtgtaaatattgtcatcctttatggagatgtgaatccaggcaaaagcatgtatcaaacccttgcgatttgccagaggtcaagctgagcattgaagaaacagagaaacagtaaggtaatgatgacaaatagtagacagagaatgggaacacaatgtgaaaaacattttaataaagtgatgagtgacattccagagtgcccaaggaaaattagaattcccaagcaggtagtgaagcaggggacgagaatgacacagctgatataaaaagttatctggagcctgggtgcagtggctcacacctatcatccaagcactttgggaggccgaggcaggagaaagacttgaggccaggagttcaagaccagcctaggcaacataacgagacccccgtcactacaaaagttttaaaaaaaattagccaggtgtggtggtgcgtgcatgtggtcccagctacttaagaggctgaggcatggggatcgtttgagcccaggagttccaggctgcagtgagctgtgatcgcaccactgcactccagcctgggtgacagagcaagaaaccgtctcaaaaaaaaaaagttatccaggagtaatgaaaagtttggtgtgatgggagctgagagtccagaaaggtgctaagagggtaggttggagctgggcccagtggctcatgcctgtaattccagcactttgggagatgaaggcaggtggatcgcttgaggtcaggagttcgagaccagcctggccaacgtggtgaaaccccacctctactaaaaatacaaaaattagccaagtgtggtggtgcacacctgtaatcccagctacttgggaggctaaggcacgagaatcgcttgatcccgggaggtagaggttgcagtaaaccaagattgtgtcctctagccttgccgacagagtgagactttgtctcaaaaaaaaaaaaacaaacaaaaacaacaaacaaaaacgaaacaaaacaaaaaaacaaagaggttaggttggataagtaagtgaaggccaaatcataagacctgtgatgaagttggggctgtattctgtaagccacgaagagtcatcaaaagcctcacttgtgagaactagttattgaatgagatcctgtgagtagagaatttatcaagatctcggcagcatgatcacgcagaaacaaacagaaacaaaggaatgtgtcaccaggattcctctctcatgcagggctgtgttaggacacacatacttcatttgagattgtttggaaagtcacctctcacccccactctagaacaacttacattagagaaacgttttcttacagtggcctcacacacacccttttgaggagaaatgaaaagctgtagtttaacaaccgccttacacgtaagaacgaaggaaccaaatgtgcaaatttagaatgacattgcattgggctgaccataaagtaccctccatccccagggcactgctaatgcggagaacgtggtttgtcatacaagacctactgggtagctgtttatttagtagaaatagtgtatgctggttacaagaatggaaaagagaatagaactaaaattactattatcaactacatccaaaaagcacacaaaaaaataaccactaggtgtatatctcaaggtcagaaggccaaaattaaatagccaagttctttctttcttcttcatatcctttcagttcattctctctgctgtcaccccacgcatatactcatggttccttaaagtctttccttgggccagtggttcttaaagaactcttatgtcagtagaagatgctttcagttgccgataccagagacctcacttcaaactgatcttcaggattagagaagcacctagcttgtttaatttgaacgtcccgctggggggcagtcatggtcgatcaatccccagccagaatgtcatcagagacccaccagtctctttccatcttttcactttgcccccagtgctttatactgagtcgggcccatggcccctgtggaaataacagggaggtgacccaaagtaatggggactatgggcatccttgttcaccagtggagagggtgtgtttgcccttgacaaccaattgaccgaagttactgttcaccatgctggaaccaccctgagccaatccctacagtccaggaaataccatggtgggttggtttagacttggattaccaaaacctgtccatgtaggaagattggggtgggggtatcactgtgactatccatgctcttcagcagtgagggaagaaatggatgttggagagaatattcacatgtctccttcaggcctctgagaatttcatgaaagccacgtgctatatccctgtgtgttaattttgcattcagtttttggaggattcactaacccactgaggactgtcattctttttttttctcttcagcttcattgaggtataattgacaaataaaaattgtatgtattcaaggtgtacaacagatggtttgatagacgtatagattgggagatgattgccacaatcaagctaaatacatatccatcacttcacagttacccttgtgtgtgtggtgagaacactgaagatctactctcagcacatttcaagtatacaatacattattattaactataatcatcatgctatacattagctctccagaacttactcatcttaaaactgaaaggttatacctttggctaacttcttactatttttctcacttcttgaccccgggtaaccacccttcttctctttgtttgtgagtttgactttttatggatttcacatacaagtcagatcatgcagtgtttgtctttctgtgcctggcttatttcacctaatgtgaagtcttccaggttcgtccatgttgtcaccaatggcaagatttcctgttttatggctgaatagtattccattgtgtatatgtaccacattttctttattcattcctctgttgatggacacgtaggttgattccatatcttggttattgtaaataatgctgcagtgaacatggcagtgcggatgtctcttcaacatactgatgttgtcccctctggatgtatatacccgggactaggattgctgagtcatatgcttattctctatttttgaattttttgaggaacctccatactgttttccataatggctacaccattttacatttccaccaatactgtaaagaataaggaccattctttaccttagaaaaataacattgcttcccagaggcagaagtgcaccttattcctagatttcagcactctctgtactgtttatccattcaggaggaactacagtgatcaaacactggagataaatagtggttttaagcttttatttcataatttttacagatgatctagagataggccaagtaataatatgtaaataattaattttaaacattcagctcattctttaaaaaactcatagcccaaatgtttgttggttgtttttttccactgggaaaggacggggaaatgtagtttcccactcctgcgccctgtatgttgttatattttaccatgtctttcatagcagcctcccatcattggttgccgtaaatcttttcactgactgtgaggtaccaagagtaaggtaatttagccaaattagtcaggacagcctcactttgtggagcccaggtgaggcttttcaataagagctgttcttccaactggaaaatgccaacaagcaacaatgcagccagtcatcttattttgaagttttaaaagaaagggtttgccagaaatactgggaaggtttagcagctgttccacctggaagatggcaaggttcttgacctgtgaaggaccatttggcattgtctgtccatgtgctgatcagttttaagtaaaccctgcactgaagcaatgaagaaagacactggcaaagtcagcatgctgttgcctcactccccgtcaccactgtgaagcctcctcttttaacataaggcccagagaggatccaagatgttgccaagaccacctgtagccaccagccatgcaggggtggggtcatgtttcttaacccacagcaacacaggtgataggcctggttcttgatctggacagccttcgcataacaccagataactgaatgctaattttcctttccatttaccttaaatcttaacagtaacacaactaacaataaaaaaggcaccatgggatgtgtcctgcttgttccacaaagaactttttcccaggtgtggcctcccttgaaaaatggctgcacccttggatttcttcgtgtggctgatttgcagatccattagttacattcacctttggctaaaggctatgggatagttgatttactttggatgatgcagtatttttcaagagaagttttcatatatttagcccaactgcttcgccacaagaaacaaagtcgtaagtatctatacaggtttacagaaaatgaaattttagctccagctacaaagcggctcagccagttcatggagacttgtcacaggttggtgactgagaagggtccacctgaaacacttgcatgtccaggtccagctgagcatgcatgccagcctcagccgctggggtccctgtctggtcctgcagcatcacgtggctcagatggcatcttcgctgtgagtgcgaagacgctgggcaccagcacctgcacaggcagatggtgaaaggcccccaactctctggtaatgaggatggcagccatatgctttctcatgcatccagctcagcctccaacctacaataccataatgatgacatgtgggaaagtctaggtcccatgccacatcccagttaaaatgcatgcactggaaaagggaggggaactcagctgcacacacattactttttttctatggccttttctgcatctacccaggacttaattgctaatactgcctccctccatgtgggatgaagtgggagaaggatcacaggaaaatacttccacccgtttgctgtggcagggctagattccaaagtgcccaggactgctaattcattcacccctttgtgacagcttatttacccacaccccaccttatttccaaaaggactccaagtagctcaagaaaggaataaagagctatagttaaaaaataatttctcaaagtcctctgcctgtctccatgggctgggctgaactttgagtgactcacccaccgtctgaagtccaagaaacaaataccctaggctgagatctggagattgttctatttgcaattcttatggagggagttattatattctccactgattgggcagtgtgttttcccagagagacagcatgaagcaggcacctgcatccactttattcttttcctctttgtgagtcttgcacgggccgtcagcctgtttgtgaactctggcaggacatggaggtcagcctgtgccaagcaccttgaaccctcattatctttaattagtgtttaggaggttaatcggtggtgaagctcatctttctttaattacttcaacaattcagtcagggggtccctgcagccagctttgaattattctgtttgtttggatgcttatttgaatttgtaaagttggatgtttattgtccagacctagaccctgtgtgcattgaagaaagtgttagggaaagaggagagacgagtatggggaaggttatttttattgcaattaatttgcagctgaatgagcccagaaagtttgcagttttaaaagtgcatcacagtcatatcagagatatcaatgattcaaactggatccaaatcttcctaagctccaattagcacatttattttatttttcatacaaggataagttcacattcaaataattagttgattaaaaaatattattaggtctctactccatgtcttgacatcttaggtgctttgtccagtcacatttaattttcagtattgtacatgataaagctaccaactttgggaaattatattccagcccaaagccttgcttcagaaactctccttaatgcctggctgacatttccttttctttttttctagcaccttatgctcattctctcctctatttattttcagtgaccaccagacactttaaagttgatctatatttacctttttataaggatccttcccaccctccatttctttccttcctcctcacttccacctacttgttccttcaacgtggccattgttctcatgcttcccggaagggtgaactttggctaaagtcatgatttccactcaacaggacagtaactctcagccacattgtgcctctgtctgcaaagtatccactgttctttggcaaagttaggatgtagccttggtaatcctttggccctggagattgtgtttttaacaaagcacctcccttagagcgggttttagaaagtcagcaggccagcgcctcccttccccttccaggaagaagcagaatctcagacatggtttcagggaggtgctcccaggagcctctggcaggagaaaggccttgtggccttgccatttccatctttgtctttgcgtttatacgttggcccagcctacattgactctttcatcgcttcacttcttcagtccttcaacaaatagtttttgagcatccactgtgcaccaggcactgttttgggtgccaagcatgtaactgtaaaaaaaaaaaaaaaaaaaaagcaaaattcctgccctcatagaacttacattctaatgaggaacacagacagtacacacaaactatgtcgtgaaaagtgtggcatggaaaaccaagctagatgtgggtgcagacagtgatgaggggagggtttctgggaagctggtctgggaagtctggtctgagtgaactgagggagagagacttgtccacgggaagaacatcccaggccaagggaaagcatatgcaaaggccctgaggtgggaaaccagagtgatccaggaacttgcaaggatggccatgtggccagctggggcagagggagggagggaagcacagtaggaaatagcgttgagaggaagccagggtccttgcgtttattgtatgattctgagtaggtaagcagcatggtcctgtttgtggatatagaattttaacagaactttctgcttataaagctgcatctttgtgattaacttagagcttcactgctatagtatgttttctccatttcccaaatgcccctatttgtaaatgcacagagcctagactattcttcacttgcttggtgacacccaggccttttcaacccgtggcacggcattttgcttggggtctctccaggtcagccaggtgccctgctaatttatctgttcctagcagccccgtgactccaacctgaccttttcataggcttgccgacaggaccacggagctcagccttgcaagtcgtggaatgaggtgatggtttccatatgtgctggggctgtcattcaaattctttgcctgctcagctaatgaggtcagaacggctctgcctgaggtggacagcctctccctcgggtagtgtgcctgcaggagatacaggaggaagtctccccacccgctttaaaggaagcttggcgagatagcattgcttagcactgttcacaaaaggataactgcagaaaaacatgaaataaaagggaatagaagggaagagacagactgacttttttaatttaaactttttatttggagataattgtggcttcataggcagttgtaaaaaataatagaaagctcgcatataccctttactcagtttccttaaatggtaacatcttacaaaactgtagtacagtatcacaaccaggaaactgacactgacacagtcaacacaaaacatacccatcaccacaaggaccacttcctccctaccctttccatcccgccattgtgcttttataggtacccctactttctattcattccttaactcctggcaaccattaactgttctccatttctatgattttgtcgtttcaagaatggcatatacatggaatcttataacgtgtaaccttttgttagtgacattttctttcagcataattctctggagtttcatccaggttgttgcatgtgtccatagtttcttcctgtttactgctgagtaatattccacccaatgcatgtaccacgcgttgcttgaccattcatccgttgaaggagatctggatttccagtttttgctcttatacataaaactcttacaaacatttgtttactggcttttatgtcaatattaggtcttaatttttctgggataaatgtccaggagtgcaatagctgggtttatagtagatgcatatttagttttacttttaggtttttttttttttttcaataacaaccatgtatttagctcatgattctgtgggttgacagtttgggctgcacattagtggagggttacctgatttgtgtgtgtgtgagacataattcaaacacataaacttcaccattttaaagtgtataattcagtggtttttagtattttcacaaggttgtggtatgtttggtttttaaacaaactgccaagctgtttttcagagtgggcataccattttacattttcatcatgatgcatgagtgatctagtttttctatatccttgccagcattcagtgctgtcctttttttttttttttttttaattttagccatagggattgctgcttagtgatctctctttgtggttttagtctgtgttttcctaatggttaatgatgtgaacatcttttcatgtgtttatttgccaactatagtcactctggtgaaacgtcttttcatggcctttgaccattttctaatgggattctttgttttgttttatattgagttttgagagttatttatatgttctagatgttagttctttgtgagacatgtggcttacaaatattttctcccattctgtaccatgttctttcagcctcctaatagggcctttcatagaagaaaagttaattttagtgaagtccaaatatcaatttttctttgtgaattatgcttttggtgtcaagtctaagagaactctgcttagccctagatttcaaagatactctcctatttttttcctaaaagttgtatagttttttttttgtttgtttttttaattatactttaagttttagggtacatgtgcacattgtgcaggttagttacatatgtatacatgtgccatgctggtgcgctgcacccactaactcgtcatctagcattaggtatatctcccaatgctatccctccccccttcccccaccccaccacagtccccagagtgtgatattccccttcctgtgtccatgtgatctcattgttcaattcccacctatgagtgagaatatgcggtgtttggttttttgttcttgcgatagtttactgagaatgatgatttccaatttcatccatgtccctacaaaggacatgaactcatcattttttatggctgcatagtattccatggtgtatatgtcccacattttcttaatccagtctatcattgttggacatttgggttggttccaagtctttgctattgtgaataatgcctcaataaacatacgtgtgcatgtgtctttatagcagcatgatttatagtcatttgggtatatacccagtaatgggatggctgggtcaaatggtatttctagttctagatccctgaggaatcgccacactgctatgacaaacccacagccaatatcatactgaatgggcaaaaactggaagcattccctttgaaaactggcacaagacagggttgccctctctcaccactcctattcaacatagtgttggaagttctggccagggcaattaggcaggagaaggaaataaagggtattcaattaggaaaagaggaagtcaaattgtctctgtttgcaaaagttgtatagttttatattttactttcaagtatgtatgctgagttaatttttgtgtaaggtatgagatttagatcaaagttctttttttctgtgcatatatagttgttccagcaccatttgtcaaaaaggctttcttccactgaattgcttttgcacctttgtcaaaaatcagatgggtatgtttatgtgagcctgttttttgtttctgtcttctagtctatttatctgtttatttctttatgaatgccacactgtcttgattattgtaattatatcataagtcttgaaatcagatacactgatttcttccatttcattcttcttttccaaaattttaacaattgttcttttacctttccgtatatactttttggaatggtctcatctgtaacgacaaaaaatggttgagattttgacaggaattgctttaaatctgtatatcaatttggagaattaacgtctttactatgctgtgttttccaatccatgaaaatggtaagtctctccatttgtttagattttctttgatttctttcatcagcattgtgtagcttttagcacacaagttttgtaaatgttttgctctgtttgcgcctcagtatttcatatatttttgaacgatcccaaattgcattgtattttaaattttagcatctgtgtgttcattgataatacatagaaatacaactgatttttgtatgttgatcttacatcatgtactttgatgaactgacttattagtactaggagttttatatctatacataaatatatatatatacatatttatgtgtgcatatatatgtatttcttgggattttccagacaattatgtcatctgcaaatagctacaattttattacttcctttctggtccctgtattttttatttccttttcttgtgttattgcactagctagaacttctagcacagtgttgaataaaagtggtgaaaatggtcatccttgccttgttcccaatatttgggagaaatcattcaactttttatcataaagtgtggtgctagctgcaggtgtttttgtagatgctctttgtcaagttgggggagttcttttcttaatttgctaagagattttttgtttgtttttaactcatgaatgggtgttgaattttgtaaaatgctttatctgcatgaaccaatatgagtgtgttttttttctctttagcctgttaacatggtagattacattgatttctgaatattgaaccatccttgtatctctgtaatctccacttgattgtgttgtgtaattcttgttatatgttgatgaattgcacttactaatgtcaggtttttttgcatctatgtttgtaaggtacattggactggggctttctttttttgtaatgtctttgtatggactggtatagtataatagtagcttcataaataaattgggaagtgtcttttccttttctgttttctggaagagattatgtagaactggtggtaagtcttctttaaacttttggtaaaattctccagtgaggccatataaattcaatttccttaatatttagagagctattaaaattatttcaaattgtgtgaattttggtagtctttgtttttcaaggaattggtccatttcatctggtttgtcaaacacatgtgtagaattgtttctggtatcctacaattatctttttgatatttgcaaggtttgagtaatatctcacttaattcctaatattggtaatgtgtgtcttctcttttttttttctttgtaagtattgctagaagtttgttaattttattgttcttttcaaataagaagctcaataaagagcttttttattgtttctctgtttttaacctatcagtttttattcttaatgatttccttccttctgcttgctttgggtttattttgctcttcttttctagtttcttcatgtgagaacttggaattctttaattttttttaatatatagattaactgctatgaatttccctcacagcactgttttaaccatgtaccacaaattgtaatgtattttctttttcatttaattcagtaattttttatttgtcttaaggctttttctttatcctttattatttggaagtgtgttattaatttccaagtgtttgaagatttttctgttatcttttttatttatttctagtttgattccattgtgtttgtagcatgtattgtgtataacttttaagtgtgttgaagtttgttttatggcccagaatattctatttcttgttatatattccatgtgcacatggaaagaatgtgcattctgttgttattaggtagagtgtggcatgaatatatcctgttggttgatggcgtttggcagttctttaaattttattgatgattttccatttgtactatccattgttgaatgagggatattgaaaaattcaactataattgtgaattagtctatttcttatttcagttctatcagttttagcttcacatattttgcagctctgttacttggtgcatagacattcaggattgctatgtattctgaatggattgatccttttgtcattgcataatgtccttcattttctccagtaagttactttgctctaaagaccactttatctaatattaatatagttacttaggttttattttgattaatgtttgcatgatgtatcttttccatcattttctatctgcctatatcattatatttgaagctagcttctaaaaggcagtatgtaattggctcatgtttttaaattcaccatgtcattctgtatcttttaattggcatatttataccatttatatttaatttattgctgatatgttggggcatatgtctgccattttacctttttgagccatcacacctagctctacatacatttaaaaccatatcagaccatgtataattttcactttaactcatcaaacataatttggagaaatcaagagcaaaagaaaagcttcttgtatttactcatattttgcttactatattctttcttttttatgttccaagatttcttcttttatcatttcctttttgtttatagaactttcttattattattttttattttttgagatggagtcttactctgttgcccaggctagagtgtggcggtgtgatctcagctcactgcaacctccgcactctggcgttcaagcaattctcctgcctcagcctcctaagtagctggtattacaggtgtgcaccaccatgcctggctaatttttttttgagacggagtctcactctgttgcccaggctggagtgcagtggcacaatctcagctcaccgcaacctctacctcctgggttcaagcatttcttctgcctcagcctcccaagtagctgggattataggcacctgccaacacacctggctaatttttgtatttttagtagagacaaggtttcaccacattagccaggctggtctcgaactcctgacctcagatgatcctcccacctcggcctcccaaaatgctgggattacaggcgtgagccaccatgcccagcccatctttgtatttttagtagagacagggtttcaccatgttggccagactgttcttgaactcctgacctcaagtgatcctcctgccttggcctcccaaagtgctgggattacaggtgtgagccaccgtgcccccaccttataggactttctttagctattcctgtaagatcgttctggtggtgacaaattttcttagttttccttccattcaagagatttctttttcattcctgaaagatattttcactgggttgacagttctgttctttcagcacctgaaaaatgttgtgccagttgctctggcctcagtggtttctgatgagaaatccactgtcaacctacgtggttttcctctattggtgtcatttctctttggctgcctttggaatctttgtcgttggtttttggcagtgtaattaaaatctgtcttgttgtggatttctttgagtttatcctctttagaattgctctgtaagtttatattgttcatcaaaattgggacattttcagccactatttctgagtgctcttttagccctgccgtatttctcctctttttctgagactctgaagacgtgaatgttagatcttctattatattcttacaggctcccaaggctctgttaatttttatagtctattttgtctctattactcagactgggtaatttctactgttctatttttcagttcactaacgatttcctctgtcccctgcattctgctgttgagcccatccactgaggtttttatttcagttgttatatttttccgttctgaaatttcctatttgttcttttaagtcttatatttcttggctgcggctttctattttttttcttttaagtgtgttcataattacttattgaaacatttttaccatggctactttaaaatctttgtcagacaattccactgtttctgacgtcttggtgttagcatctattgatcatttttatttttctccctgtttgagatcttcctggtttatggtaaaataagtgattttcaaatgaaacctggacattttggctattatgctatggactctggatttcatggcagcctggctcctgccgggtagaggtaatccagattcactaatggcctctgtttatgtcttcagggtagggatgggagctcctgctctccaggtgcaggggtcctgattctccataagaccttttctgacatcacccagtgaagagggaaaaggatgccttcacatttcactgggttggggatggaagtctagtcatccgaagtgatctctgctgacatcccagaagggaggggtccttattggctggcagggatgaaagtcaaggatccctgcttggtcttctttttcacctccccataagggtgttggagagcctcataacagtctcctaagggaagaagtctaagagcaccactaggtctttgctggcatgggttgggggtgagggggccacctttttctctggggtatctggctgcagatgagtacttcaggcctgaaagttttctgtcttgctaggctgcccctttcctgttcctttgtctggagagaaaaggcatttgctaggtaggcttctttgttcatgcctgtggacattcagaatcgtcctctgcctctactgggaaaaccttgtctgggacagaggaaatcaagcactgtgctgctacaagcctctcttctctccagtgcccagtttttattattagaggaaagttgggtccagggaggactggaggaatctgttgtttatttttggaacggaatttgtattagggttagttaaccttgaaccctatggtgtcttcagccagaatgtcccccaaactgtcccatgtaacctgaattcttaaaaaattacaatgtttcatctctataaatccacaaacactgctcacaatatcttctggaatttggagtgagcttttctctctggaagagaatagggacaatgtccatattctggcattttaaaagaataatacagaggaatttaccttggccactattggaaaacctactgtgtcctgagctcaatgctgggcgttatggatagacacgagacaaatggtgaaggattgagttgtggagacacaacataagaagagagtcgcaccacaaatcagttaatacaaagcacacatgcaattttacatattgaaccgtgtcctctgttttcagcccaggataggtactgtgaaaaacataacaaaaagtgtaagacttggttccggctgaatgaaccctctagttgaacacacagatggtgtgctggtgttttccagggatcactaggcacagtgctgcttctcagtctaccagctctccatgggtttctacaagctgagtccaaagttgcatctcagctttgacctctctctggtcccctgtcttctgaacacctcagaggcgctcacaggccccacatctgaaactggattcattgctgttcctgctgaacctttttctcctcctgtgtttgcatctggatggtcagcaaagggccatccattgttcaggacccagcttcagtgctgattctctctgccctgctccaagttcttcactcctccacgtcacctctcctgagcctagcacaatctctgtaagggcatcatcaccttatagcatggtaagtgtctgcacggcgaggtcaccttaaagactgtgagttcatgagggcagaggctgtgtcttgggtaactttgtttccaacattgggtctcacacacagtaggcgcagtacaaatgctgaattaatgggaggtcaagaggtcatgtttttaaaaagaagatgcatatggattggcagaaaggggaaaggagaatcatctactaccatctaacagaatggaatttctggagggctcgtagttccgtggtatataaaataaatataactcttattgaagttttaggctggaaaaccgattttgtttttgttttattcttgtgattttccttcattacataagtgtctttaactaaggtaaagttttagataaaacaaaggtctaggtaggtctggaatacacttgagccccgaaggttttcatttcctaatgataatgagtaaaataagttgccaattgtggctatgaaatatcattctctaataaagcaggttagaatgttaacagcctggtggattggtagatgtttggccttccctgaaggacagggaactggggaccagctttttttcttgagggcctgtcacatctgtgttttgcagactgcccagtagctaatttaaaaataagtttctaaaattacctacttgtttttggctttgttgtagtgtcagctgtgattccggtcagttgtaactattgacaagatctaaaattcagatttggagttatttgctgtgtactccacactcccgctctttggcagttatgcatgtgtgatttttgcaggaatagctttctaacagaaatgtggacacaagagtttatttttctccatcataactcagctctccacttcttcctgagactgatcattttttgaggcaggagcataacaccttctctaggatttgtcagcttctaaaaagagccttttgtaaggacttgtatgagcttgggtttcaccatcattactggggaggcactaagactgcacatatctctgggtgaagtaatgtctacacaacacctttcatagcaatagttcccagctagcatacctgcttctgccagtacagagccaaaaaaaaaaaaaaaaaaattaagtactttaatgccaataccccccaccatgggaaaaataaactgtaaaaatggcatcattaccaacagctcatgtgataggagggaactgaccttgatttggcacccaatccacctttttttaattcaattttctttctcaaaaaaatgtgataaaatgcacatagcataacatttactattttatagtttgccatacatggcagttggtagagtcacagtgttgtataaccattaccactacctagttccagaatattttcatctccccaaaagggaaccccatatgtgtgacgcagtccttcccacttcctttcccccacctccctgccctacagcccctggcaaacacgagcctgttttcagtctttacatatttgcctattttggacatttcatataatcatgtaatacacagcctttgaggttgggcttctttcacttagcataatattttcagtctttatccctgaagtatgtatccatctgtaccatatttctttatatggctgaataattctccattgtatgcatagaccacatttgcttacacatttgtcagttggtggacatttgggtcgtttctacttttggcttttgtgaataacgcagctagggatattgtactggtatctgtctgagtccattttccattcatttgggtatattcttaggaatggaattggtgagtgatgagataattctgtgtctaacttaccaaggaacagtggctgcaccattttacatctcaccaagtaatgtgcaagagttccagtttctccatatcctctccaacacttattttctgagttattttggttttggggtttttttaatagccatcctagtatgtgtgaagtgctatctcatggtagttttgatttgcatttccctaatgactaatgatactgattatcttcatgtgctttttggctattgtgtattttctttgaataagggtctattgaagtcctttgcccattttttaatcaagttgtttgtttttttgcttttgagttgtaggtgttctttatatattctggatactagacctttatcagatatgatttgcaaatattttctcccattttgtagttgtcttttcatttccttgataatgacctttgatgcacaaaagtttttaatttccatgaagtcccatttatctgtcttttattttgttacttgcatttggccattgccaaagccaaggtcataaagatttgcccctgtattttcctctaagatttatattgttctagctcttatatttatgctttttattaatattaattaacaaactgtaatttataagcctctggggtacaaagttatgttttgatacagctatacaatgtgaaatgattaaatcaagctaattaacattgtcatcacctcaccaacttatcattttttgtgatgagacatttgaaatttactcttagttattctgaagtatataacacattattattgactatagttaccctgttgtgcaatagatcttaaaacttactccttttgatgagttcatgtccttcatagcaacatggatgaagctggaaaccatcattctgagaaaactatcacaaggacagaaaaccaaacaccacatgttctcactcataggtgggaactgaacagtgagaacacttggacacggtgggggaacatcacacaccagggcctgtcgtggggtggggggatgggggagggatagcatcaggaaaaatacctaatgtaaatgacaagttaatgggtgcagcaaaccaacacggcacatgtatacatatgtaacaaacctgcaggctgtgcacatgtaccctagaacttaaagtattaaaaaaaaaaaaaaaactcactccttttgtctaattgaaattttgtaccctttgaccaacagctcgtcattccctcactcctccactctcaaccccagcctctggtaaccatcattgtactttctacttctatgagttcaactttttaagattccatatataaatgagatcatgcagcacttgtcttactgtgcccggtttatttcatttagcatagtgtcctcttggtttatccatgttatagcaaacgataggatgtcctttttaaggctgaatagtattccactgtgtgtgtgtgtgtgtgtgtgtgtgtgtgtgtgtgtgtgtgtgtgtatgtaccacagtttcttcatccactcattcattgatggacacctaggttgatttcctatcatggctattatgaataatgctggagtgaacagaggagtgcagatatcccttcagcatactgatttccactcctttggattatatacccagaagtgagattgctggatcatatgatagttctatttttaattttttggaggaacttccactgttttccatagtagctatactaatttgtattcccatcaacagtgtacaggggttcctttttctctgcattctcaccaatacttgttagctttctttttttttttttaataataaccattctaacagatgtgaggtaatatctcattgtgattttaactggcctttctctgatggttagttgtttgatcattcttcatatacctgttggtcatatgtatatcgtcttttaagaaatgtctattcaggtcctttgtttttttttttaattgagctatgctttcttgatattgtttgtgttccttgtgtattttggatattaacctcttatcagatgtatagcttgcaaatattttctctcactctttaggttgtctcttcactctgttgattgtttcctttgctgtgcagaagctctattgtttgatgtcatcccatttgtctatttttgcttttgctgcctgtgctttcagagttatattcaaaaaattactgtccagaccagtgtcatagacctttcccctatcttcctccagcagttttagtttcaactcgtatatataagtctttaattcattttgagttgtttttgtatatggtgtgagataagggtcaagtttcattcttctgcatgtgaatatccagtttgccaccaccatttattaaagatgctgctttttcttcattgtgtgttattagcacctttgttgaaaatcagttgaccataaatgtacgggtttatttctggcagtctagcctgttccgttggtcaatgcatctgtttttatgccagtaccatgccattttatttgcaatagctttataacatattttgaacacagggagtgtgatgccttcagcctttttcttagtgctcaagattgttttggctattgagggtcttttgtggttccatataatcttaaggattatctttttctctttctgtgaaaaatgacattgccattttgatagggattgcattgaatctgtagatcactttgtgtagtatgattattttaacaatagtgttgttttacagttcatgagcatagcatcccatttacttgtattttctgcaattatttcatcagtgttttgtagttttctctatatagtcttttaccccttgattaaatttacacttaagtattttgtgttgttgttgtgcttgtaaatggaattgctttcttaatttcatttttggatagttcattattaatatataaaaacactactcatttctgtatgttgatcttgtatcctgcaaccttactaaatttactagttctaaacagttttttggtggagtctttaggattttctatacatagcattatgtgtaccaacaaacagagataattttgcttttttctttcctatcaggataccttatattaccctcttgcctaatggctctggctgggactttcagttctatgttgaaaagaattggcaagagtgggcatccttgtcttgtttctaaccttagaggaaaagctttcaacttctcaccattgagtatgatgttagctatgggtttgtcatatatcctttattgtgttgagatatattccctctataactaatctgttgagttttatcatgaagaggtgttgattggcttttctgcatctattgagatgatcatatggtttttatatttcattttgttaatgtagtgtttatagatttgtgtatattgaaccatccttgtatcccaggcacaaatcccacatgaccatggtgaatgattctttcaatgtgttgttaagttcagtttgctaatattttgttgaggatttttgtatatatagtcatcagggatattagcctgtaattttttttcttgtgattccttgtctggctttggtatcagggtaatgctgactttgtaaaatgggtttggaagtatcccttccacttcagtattttggaaaagtttgagaattggtattagttctttaagtgtttggtagaattcagaagagcagccatcaggtcttggccttttctttgatgggagattttttactagagatccaatctccttccttgttattggtcagttgtgataggttgtaagtgtctaggaacttaacatttcttctagattatccaatttgttgccatatgattgtttgtagtaatatctaatgaccctttatgtttctgtggtatctgttatagtgtctcaactttcaattctcactttatttgcgtctctcctttttttcctagtcagtctagctaggagtttgtagatcttatctttggaaaaaaacaacttttagtttcactgatatttttccattgtttttgtagtctctgtttcatttatttctgctctggtcttttttgtttccttccttctgccaactttaggcttagtttgttcttccttttgtagttcctcaaagtgtaacattaggttgtttatttcttctcttttgatatagacatttatttctataagttcccttcttaagattgcttttgctgcaacccataaatttagatatgctgtgtttccattttcatttgtttcaaatatatttatatctttgatccattttaagttaatttttgtatgtggtgggaagggcccaattccattgtttggcatgtagaaatctagttgtcccagcaccatttgctggagagattattcttttattattgaatggtcttcacatccatgtcaaaaattaagtgaccattgatgtatgggtttatttctggactctcaattatattctcttgatttgtaagtctatgtcagtaccatgctatttttattactgtagtttagtaataagttttgaaataggtatgtgtgagttctatgactttgttcttttttcaacattattttggttattttgggtcccttataattccatgtgaatcttaagatcagcttttctatctttgcaaacaaacaaacaaaaaaaaccattgggattttgataggagttacactgaatctgtaaaacactttgactagtattgctatcttaacagtatcatctttcaatctgtgaacacagggtatttttcaatttatttgggatgtctttaatgttttcagaagtgttttatagtttttttatgtatgagtgtggcacctctttggttaaaattattcccgagtattttattccttttgattataaattggattgttttcttaattttcttatcagattgtacattgctattatatttgtatactactgatttttattggttcacctggtatcctgcaactttactgagtttattaactcccgtaatttgaatatgtgtgtttgtgtatattcttcatcatataagatcatgtcatgtacaaatagagatagttttacttctttctttcatatttggatgtattttatttctttttcttgccaaactgctttggttagaacttcagtaagtttgttgaatagaagtgctgaaagttggcatccttgtcttcttcttgaacatggaaagatggctttcagtcttttaccattaagtatgatgttaactttgggtttttttaaattaatgctcttttcatgataaggaatttcccttatatctttagcattttccacaataaaaatatcatgaaagagtactgaattttgtcaggtgctttttctgcatcaattgaaatgatcatgtgatattttttcctacattctattaatgcggtatattatattgcttgatttttatatgttgaaccacccttgcattccagggataaatctcatttggtcatagtatataattttttaaatatactaaacttagtttgctagtattttgttaatttagtattcatatactgaatttagtttgctagaatttagtattttaaagagattctctctttaaaaaaaaaaaaggaaaacatagatctaaattgctttttctgtgccaatctgtactcctcttttcttctcattatttcagaattaaccaaagtaaatattttgttgtgttttgttcaccttttttactttgtttttgtgaacagatagcttccaaaccatatatagatgatataatattgtaaatggtaaatgttatcctttcttacccatttcaatcttgagcttttccaacattattgttcatgagaaattttagttacaactattcacaatggtctcctttcctccaaagaagagaagggtaaattggaaaaataatgttccttgacatttcaacattggagtgcatggagaaatcagtgcttcctacacctccagtagagtgtttttataagctctggttcctgttttatgacctctaaagctttgtcatatcctttgctgttttaaaagtttcagaaaaggttgttcctaaggatagcaagactctgcaaagaatagttctgtgatcttgttctgtagacatggtgttttccagtagttggttcagtgaaataacagattatttatagaaaccaggtggagtcaatatgatggactgagctaactcagaaaagatccttccaaacacacatacatgttaggtgaaatataaacaaaggcaggctctcaaaacataactaagctcaaaagaacgagaaataaatccagataccaaaaacagaggcatcaaagccagcagggttagaggaggtgaagccaaggaggctgcatgggagtatcagaccatgcaaagggctcagaggcagaggtttcatgggttaatgcagggagagaacagcttagtcccatgtgagatataacagaaccctatgcataaagttgcaaattttgtagggatgccattttagtgaaacagaaactagaaaaatttttctccttagattgacagagaagcaatgagtcatcctgtgtgcccagggaaatagatgaaagaaagaattacccactagaaactggaagcccatgcttatatgagaggtccaatttcaggcttcccaatgctacatgctaatatattaatatacaaattgatgtaacccacagggccctagcagaggcaaaagaaaactcattctgaagaactagagcacacacaggaaatgaaccacaatgaagtagagagtccttctgtactaaggataggaaaattagcttcccactagctggaattgcaaggaaagtctgaaagattctataaaatagtgatgaaagaagatacagatatcaaaaagcaagagaagggtagtatgtaagaacaggtggatttggaagaaaaataaaacatatagacatgaaaagtccagtgatttaaattaaaacatattagaaaattttaaagtagtttagataaagctgaagggagaaggggaatgaaaaacatgggagagattgagggatgtggaagatagaatgagatcaatatggagatactgtagatagaagctccaggagaaggtaaaatagagaacggaggggaggcaggaatctcagtgttttctgtaagtgaagatccacaaacattcaagctgttgtagctttccagacctgagcagctgaacaggatataaaaacaaacctataaccagtcatactaaatattgtcatgaaactacagcccatcaaagacaaagggaattattgtaaaagcaaccagaaggaaaagacagattccctgcaaaaaatggcaaactgagtagccttcagtgctgaagacaagaagagatggaaaaatcagagttgtgtgttctgaagtgtttgcattattgaagaagggggttaaattattttctaacttttgaccttgtcaaatatgaaggctagaaatgtaagggtgaccactgaaataaataataaagtattcctctaaaccaaaaaataaaagcaaaaaacatgataaacaggaagcataaaataaatgacaccatttatgcgtatttttaaatataattggatattaattacccatacatatctatgaagcaacagtatgaaatatagactggaaagctgtttcttttttatggaagggagaagaatggcgagtataaggaatttatatttaagactttattattttattaaaatctgaagtaatcatagttaggcctggtcctgacatttgcaggacttggtataagagtaccagtggagaccttgaaccacacataaatatgtgaaagttacaaatcaagctagcaaagaattctgtcccttcatgatgacaccttcataaagcctggtgcgcttcctgattcctggcttatttgaaggccttagccagagtaaggcagcgtgggaaagagctcactccctggacaccctctccatgcttcagaaccccagctctgccctgcactgagggcatctgcgcacgtgtggtgtggtgaacatcccagcccacacatccaggttctgttcacatccccatgcaaaaagcaccccttggccacccccacagacctggggtgtgcacattggctatatggtctacttttagggggatggagctcaggatggagtcaagttagccttggatggaggcctgggtggtcattgagcagggacttctagggtcccaaataactgaggtggtggatggcaggcctgggccatgggagggtgtacctccttggctgtggacccctcacagtgtgtggaggaagggctgcggcacagagtgggtccctctgaagcaagaagtcacatttttaaataatatctcattataggctgagcacagtggctcatgcctgtaatgccagcactttcggaggctgaagtgggcggatcacctgaggtcaggagttcaagaccagtctggccaacatggcaaaaccccatcgctactaaaaatacaaaaattagccaggcctggtggcaagtgcctgtaatcccagctactcaggaggctgaggcaggagaatcgcttgaacctagtaggcagaggctgcagtgagccgagattgcgccactgcactccagcctgggcaacaagcaagactctgtctcaaaaacaaaaagaaaaaaattaattataaaaaaagaagacagagaaaagcattcaccactctaggcggcatctaggcggcgtctgccagcacaggagccctgccagcaaagccccatctgacctttgtcaagttatttgacacagctgagtctgttttctcacctgcctggtgagaggccaacatgtataatttcaatgatccctcccatttctgaggatctgtgacattctcataagccccatcatgaggaggagcttctgggatggccagggtggttcaggaggcatgtccctgtggtccaggggcatgggggcagagcctagtcctgcatggtctccagcttctgagaaaataatgtgtcagttgcccattatgtccccatgtggggcctggctggtgaggctaccctggggccaggcagggtgaggggccccctctgcacacagtgccctttattttgtgcaggagtcatggccagtgctgggcacgtgttggacagggaggacaggcccttctttatacctgccacattctgaaaccaggcagcacagggagctgtggacagtcggtgatggcagctacacagagggacaggtgccacgggctcactcctcctgtgtttgcacaaccatgccttccagggcaattgctcagccagacccggtgagattaatttggcccatggaagaaagaggagacgggagggaggaccagtgtgaaaggatggagaaagtatttttcttcctcagccatgagacgttttgccaagcttagctagctgaggctcacccttaattgggaatgaattaaacattgttatttcaaccaaggcactcagaaatgccctctcctggaaattcaaaatgaacttcagctcaaagaactgtgaagaagagccagggccccactcctctttcgatggccctgagggagctaggtgggtctgcagtcatgggaggggcctcctcaggctccaggctcactgatcgatcgggggcagggtacatgggattcaagcacctgcagcttcttctacaactccgtatcccctcacgttcccacaaacgtaaggggggtctgtatttgtctgcctgggctgccgcaataaagtgccataggctgtgtggcttaaacagcagaaattgagtttgtcacagtctggaggctggaagtccatactcgagctacttacagattggtttctcatgcgagcactctccttggcttacaggtggctgtgtgctctgtggtcttccctccgtgtatgcctgtgtcctcatctcctcttcttattaggacagcagccatgctggattagggcccaccctgatgacctcatttcaccttaattaccactttaaaggccctgtttccaaatacagtcccattctgaggtactaggggtaaagacttcaacatgtgaatttagaggggacaccattcagcccataatctattatgcctctaggtcactggcaaactcctgtaatgacaagcgaaatgagagcctgatagtaaaaatcaaagcactttgacctgcctgggcagttttcaagcagtccctttgggcttatagaaataaacagactgggcatggtggctcacacctgtaatcctagcactttgggaggccgaggcaggaggatcacttgaagccaggagtttgagaccagcttgggcagcaaagcaaggccctgtctctgcaaaaaatgtttaaaattagccaggtgtggtgatgcacacctggggtcccagctactcaggaggctgaggtgggagagttgcttgagcccaggagttcgaggctgcagtgagctatgattgtgccactgcactccagtctggacgacagtgagaccccatctttttaaaaaaataaaatagtatagaaatagccaagctccagaacagttccacatgtcttcacagcagtggcaaccttgaagggaataggttcaggaaaggcagggactgctccttagccgtctgttttagaagaaaactcgccttgatgttcattggggttcaaaataatcaagttctgcagaacgaagctgggctgtggctggggtcctgaggcctccgcggggctctcaccccgtgcaggcagggggctgcaggcaggagtgaggcgcggagatgtttacccggaaacaggcctctccttggagaagtgtcctgaaaagcccacggtcccgcgggtatggaccgggcacatgcacacttcagcgagcaggaagcgctggctaagggagggactggaaacggcgttttccacaacagggagccagcattgaggcgcccagatggcatctgctggaaatcacgggccgctggtgaagcaccacgccttacccgacgtggggaggtgatcccccacctcatcccacccccttctgtctgtctccttgtgcaacccgagtgttcaggtgacaagagactgacgcgcttgctttatccgcaggctgaacgagcgcgaccgcctgatcaagaggctgggccggaagacgcccccgacgctgttccggggcagctccctgcagcagggcgtcccgcgtgagtaccgcgggcgggggctgatggaggagtgggtgtcggtgcggggcgggggttgatgaggagttgggggagcgggcgctgatggggggccgggtgagtgctgacggggggtgggggcggggcgtgcgtttggaagtggaactgcaaaatgtgtatttggccccaggaacgtgcagcttgagtgtaggcaattccctgggaccacaaaatccgtaaacttaaaatcctggtgtggttatgatccttccgtcagcctcccaagaggagttttttaaggttgaagcagtatgacttttaaactgttgcccctaaagatagcaatatgaactgttttgtgtagtgttgccatattgattgaaacaatgaccatcattggggaaaaacatcatgcttctcccaggaaggctgccccacgtctaagcctggcgtccccctgccacccccgcccccacctccagattccagaggagagtgggaggctgtgaaacatcccctctccactgcccccgactttggagctcagggggagctcatgggcttgtttttagcaatccagtcatcagatcccagctgaggcagatccaggccaccttccccagggccaaggccaacccagccctgcctctctgtgtcctgcggccttccccagccccctctccacccccatcacgtgcacacgccagcttttcctcccatacttactccctgcctccctttcccttccggaggagtttagagggaaacgactggtagaaagagatgagttgggccggacgcggtggctcacgcctgtaatcctagaactttcggaggctgaggtgagtggatcacttgaggtcaggggttggagaccagcctgaccgacatggtgaaacctcgtctctactaaaaatacaaaattagctgggcgtgacggcacatgcctgtaatcccagctacttgggaggctgaggcaggagaatcacttgaacctaggaagcggaggttgcagcgagccgaggtcatgccattgcactccagcctgggcaacaagagcgaaacttggtctcaaaaaaaaaaaaaaagaaagaaagaaagagacagatttatgaacgtgaagaatcattgttcacacagtacaggcagtgaaggatctgtgttctgttgagctctgcctgtcaacaggtatttgcagactttctcaatggagagagaaggagggagacagagtatcattgcttttcagtaatctaccccctgtcctcactttcccatgtggaatatcgtatgggaagaaggggactgacatgcttctgtcctttaatgctccactgccctgggaggtgggtaatgccaccccaaggacacaaagcagaggctcaggtcagaaagtgggtggcccagcattgctcagtggcatgccatgaggtctggattgcagcctcagactctggcccaaaagagaggtaagtcaagaagtttgatgggacaggagtgctaactgtagggcagccctctggagatgggctgcctgggttcctgtccctgctcccctgctttttcgtgaccttgggcatgttacttaatgtctgcttctgcatctgtaaagttgggtaatatgagaacttactggatgccagaggttcagtgtaggtcctgccacccacagctgcacagaaagccaatcactgaaacaacaattatagccaaggaagaaggctttatctggtgctatagccaaggaggtggcagattagtcttaaatccatatccttgactgactaaaattaggggtttatatagcagggaagaaatgttaacaatgtgtaagaaaacaggaatcagtaggggtaaggaagcaatcaagatgaatgaggggcttagcatctcgttgtctggatgagatcattgggtgagtttcagatctttgctacttttcgagaggcctgtgggtccctacctaaggaaggaactcagataaaacaaatacaaatgtcaagctttaagaccagaagggtcatttctatgttaaaaaaacaaaaaaacaaaaacaaaactgtctatgggactattgggttggtttcaattaggaggattaaatgagatcataaagataaagtgtctatataggcaatatagggtccaataaatgttgggtattattattctgccattagctgaataattttgggaaacttaatttctctaaatttttattttctcctgtggagaaaaaagaattttaatgatatacatcttacacagtcctgtgagtcttcatgacagcatgtgtaaagcaccttctgtatgccagacacagagaaaacacatacaggttcccagaactctacagggtctgttctgttgagccgtgttgcctctctgatgaatgtttcaaaataaccatagacagaatatacacgatatatatgttgtgatcaaagaccgaatgagaatttttatgggagagtcataaatgtcttaaagacaactactaaatgcttttcttaagtcaatattttgaaggccaaaaaaaaatctactgaataaatataagaaataagaaggcttctgaaatcacaccacattttttaaacattcagtgactagtaccagaacctgatggataacttaggacgtttctgtcactaacagccagagaagatcgtcgggtggtcagagctggtcctggggtgcaggatgggcatatagcaggtctcagcctttgatgttccgcctgggtctgtccaggaaactagcaggaaaaactctaatcttggtagtattttagttcctgtgagccaccaacatacaatatttgtaatcagcatttcctacacagtctgatttcctctttgtccccatggtcttctcatttctatggctattaggaatctttccagacaggaaactgctattttcattaagatgctatcagagcacagattcaaaggaatgctacttaaggggagttttattccaaaataatgaaaaaaaaagacataattttatggatttcaccaaatgttctacccggagaagacaaaacaactaagaaatccgtctttcctcccacctcctttcacctacacgattctgttctccattctggctgtggctgtttaagaaagcagatgctttaggaagccagccagggaaagttcagttagttgggtccatgagagctccctccaggcccccatcaggacttttctggctgttaggacttcctgaaacatgagtgaaagtagggagtgcaaagagctggaggcttcctccgagctccccgtttggatgcaaatgacagttaaaggttcattaggcagagctggggagcaggtctgtatcttcatccggtgggacagaggctgggcaggcaggactggttgaggggtgatggtgtctggttttccagtaaaactcctcccatgacagctctaactcccgccaggcctggtttctaagaggaaaatgtttaatctgaaattttatctgaacatgggaggactccctctcccaagataaacctatcaggccattctcctttcactcttgaattgtagagtccactttcattctcggttaaggttaagaaagtcttagcgtacaacacgctggaaatgtggtggtaggtgcagccaatgggaactagggaggatggtgggagacatttagcacagacctcacgttgctctacttaccctgggaggtttacaacaggaggggcaactcttctctgcctgtctcttcaaagggaaacctcgaaacccttcccatcccagaggggccaaatcatcccgctgcaatcccatgggaggcccttgtggccatggcactaatgcacacagaagaagtgacagagttatgagctgaagaaacccccggagttgggtttccagtagacacaggcatgttatggaaaacaagataaataaaagaaaaggcttttgcaccttccatttgaacagggagtagactattccaaaggctaagatacctttcccgaaaggacactccctaatttatttttatgtctccatgagttccccccaaccaggagaaaaaagcaggccaaaagaggtataataggtagttaattattctttttggatggactgttgacaccgaccctttcttttctgacgtggatgcagaggcctccgtgttggtgcagtgtgaactagcactgacagagggagagaatcctgcagcctgggtgtgacgggccatgaacatgtcctggagcccatagagaggactggaggttgagagaacttgggccttgcctggtccaggccatttaatttacagaaaagtacatcaagacccagggagcttaaagatcccaaagtcacatggacaagtagcagcaagcaaggactagaaccaccctttgtttcctggccaccaccctgaccccatgctgcagccacttggggccaccagaatctaagatgaaaacaagcgagtggagaaagacatcttcagggtggagagctcagtagtcctcagcttcccaccggaagagtttataaaagagtatgtcccattctttggggtgactgttctttactcagaaccacttctgtaggactgaggagcagccccgggagtggtgcagcagctgtggagccagtgacgaccctgccattgcagctgctgttctgccaggccccctcaggatgacttcagatgtggactagaaacgttccttgttaaagaactggagaatggaaattgtccaagttgaccacagtacatagccttgttactggagcagacgaagcagtgttatttgctagattttgctttgaaacatcccaaggaaagacgtctcctcttggactgcagtaaaaatgcttcataaagggcagcttgtacaggattggggatgagagtgtgtgtgccacacggtgccagagggaggcaggaggctggggcagctcctccaaagctgggcaacggaggtttccttgtccctgctgctaatctctgattaagcaacttggtgaaaatccaaaagctcttaggagaacaggagtggtggcatttgctcttcggtgcttgaaagcagatcatgtgaaaactctaaagccctgagaatcaaagcacagccacctacctggtcaggaagttcaagtgcactaggtgtgggcccaaggctggcacaagcatatccgcccccaagggagctcccctccaggctgatgctgccttcaggctcagacacccacctgctcctgtacccagctgtctgagggctcacaatggtctgggagctgcttcactgtggctaccatgtggtgggaatttttggtttgtaggttttgttttgctagaaatggaggtgagcaagtagacaaaagccccctgtggaagattcctctctgttctgttctcttctgttctgttcaccctggctcagcttgtatcaccttctctcccgcccactgtctcttcctcctgtggcctcactggtctgggccctcctccctgctgctcagcccatgtcctcagtcaactctcaggccacctctgcagacaagcccttgcctcccccgataacccccctgagcctttgggattctcaggcagtggccagaaggcatgctctctggaagagccaggaagccagcccaggaccgggactctcagttatgggaacacacagagtaagaaaacagcctgagtgtcttcttttaaagtctcctcctcttctccatcccacgaggactcttctgtcttgttactgtatgtcttgatactctagaaatttcctttttaagccagatgcctcaggaaattaacaggcagtccaggaactgattcatgggcacccttttcgacttcttttctccttttaaagagtatgacagtgaactcacagctcccctgataagttgtacgcatgcatggatggaattcaagattgtcaggtttttttattgtgttgtcttttggccagaatgtctaattgagctgtgggacttttccagacccctgacacagaagggttagccaatggagagcaggccttataaatgtctttctgtgggaagggccagttggaagaaaagccccactctgggcttgtgaacactaaagctggttctcagctctagagtgtggaccctgggtttgcttcccagctctgccactcacgaggtctgtgaccttgggcaggtcacaaaaatctctgtgcctcagttttctcatctgtgaagtgggaggagtataatcccctatctcatagggtttctgggaggattaaatgagctttattttatagcacagtgtcttagacacatggcatttaatgagtcttggctattatttattttattaatagtatatgaactgattgtgtaagaatagtctttgtatggccacaggtccaatcaatcactaaattccttttgagtttattgtgtaacctttttctttacatggaaacaaccctactttgattacttattaccagtccagatcagtctgatttaaaaacagggctgggtgtggtggctcaggcctgtaatcccagcactttgggaggccaaggtggacagattgcttgaggtcaggagtttgagaccagcctggccaacatggtgaaaccccgtctctactaaaaatacaaaaaaaaatagctgggcgtggtggtgcatgcctgtagccctagctactcaagaggctgaagcaggagaattgcttgaaccctggaggcagaagttgcagtgagctgggatcgcgccactgcactccagcctaggcggcagagcaagactctgtctcaaataaataaacaggaaggctccaggtatcacgtgcattttgccagcttgcactattagtgttgtgtgtgtgtttccctggcatgtttacagcttcataaattagctggctgccctacagcatcaggcagacaggagtgttttttcttaattggcagtgggaaagtggagtcggggaccagtgacccactgtgtgtgattcccacactgagctcagccgcagccccctagaaataggaaacctaccctcagaggctttcccttcccagcatcagcagctagaaccatgggaccccagttagcctgcacacggccgccacggcccctctatggccacaggtttcttcatctcaagcctccacctatccaaggctaaggaggccagatgtcgcactcacccgcacgctgccaaaaaaaagcagcttattttaaacctagtgtgctcccccaattctcctgttaaccagtttctcctgtgtgcttcactttcagatgggtatgctttttctcaagaagaacacggagctgttagtcaggaagaagtcatccgtgcttatgacaccaccaaaaagaaatccaggaagaaataagacatgaattttcctgactgatcttaggaaagagattcagtttgttgcacccagtgttaacacatctttgtcagagaagactggcgtcagcagccaaaacaccaggaaacacatttctgtggccttagccaagcagtttgttagttacatattccctcgcaaacctggagtgcagaccacaggggaagctatctttgccctcccaactcgtctgcagtgcttagcctaacttttgtttatgtcgttatgaagcattcaactgtgctctgtgaggtgtgaaattaaaaacattatgtttcaccaatatttaaacatcagtactagttgtcctgggagaaagggaaaggagttttatgttgcgtgagaggcccatcctgtgtaattggagcagggcacacttgcttcctgttgagttaactcagaggttaagtccaacgggccacatgcagacttcactgtaggcaggttgctctcctgctttgattcctgttttgtgtgtaaaattggcataaacttcttgattgcagtgaaatcacaaaattctctatcggggtggtcaacctgagaacatttatttgaacctcttagccacatttccagcagggcaaaccaactgatgccctggaagagtcttccgcaccctctccaggtgcactcggcccagtcctgccgccgtgtccaggcgcccctcacccccacacctgctgcatggctggccacaccactcagtgcatggcggccgatgggcagccaacccaaacccgcgcctttccttgttccactgcagactcagatacagatgcgaaaaattccttcttccaccgcccttctcgttctgtaaagaaagaaaagaaacatagcctttctgcatatattctaaacgtctctctgcctctgtctgacatggggccaccccacaggtcagagtggtggtagaaccccttcaggactcccagccgtggtcaggctctgaatactcccttcccaacatccagactgctgggcctttggcatccacttacattagaacccacgtttgtttcagagcacattttggactttcactgttgggaaatgaatgaatttataacatgcctgcacagcgaaggaacacacctgtcgctcttagctctagagtcagaggatgagtaaacccagatgcaagagtataggacattgagtggggagaacaagacgaccacagaagtcctcagaaggagaaggaaggacacggagacactgagaggaggacacagaggaatcgccaccagatctttgcagtagaaactctgaaataggccttgagacccagacaattgtcatgatcagcccagtgtgtatgagagcttaaacaagaccttcacacacagttctaattgaaaagaattccaaacatttcagggaaacacctttttaaaaaatatactgacatggtttcctttctgtatcccatcagtgttagacacaggtacctatcagaatacggcatatcctgaattatctaagacaaggaagtgaagagcggaatcactgactttcccaactgcagagtcccacacttaaatctcaacagaacctagatgtcttcaggcatgaatgtgagcacctggagcccttactaaacaacctgcctggagccctgttctctgctctggttgccaaaccagatttttggatggcctaaatacttgtgggcaactgttactggtgaaaaatgggagtggagagcatgttttggattttcactgtggggaaatgaatgaatttatcacatgactgtgcagcgaaggagcacacctgtcactcttagctctagagtcggaggatgagtcaaccctgtaggaatgattgtgctaaattaggaaataacactttagtgcactttgcttcctaacccttttttgtcagaaatctacaacctactgggcatggaaatgatttaaaatatgatctgcattgactaagaaaactcatcctcacttatgaggtgaccaggatgcagagagggcctgaggggcagcagaacaatgcaattcacaggtgaggctccaaaaagggccatttctttctccccaaggtgcatagaacatttttaaatatcagagtacccagcaagacggaaggactgtcatgcaggaactctaacacaaaatgtgcctatgactaacacgacaaaccaaggtgtatggtttctttgcacacccagaaaggtgatggccaagatacagaggagaaacgaaaactggaattgaatgtgcattaggcatcttaactattcatattttgtctcatttgggaactaagcctatttggaaagagtggattagaaattgaattctttgtcaaacagttagctctgtcttgaacttgaagccttccaaatcagaattatgtatttaagtgtgtgtttgtgtttgtttggggtttttgtttcttacattagagttcatattttctgggatttaaggatacaggtgtattttcctattctcttgagaagtagactaaacaatatttgcagtgatgacagacgcacacagaagaaaacattagaagagatgcctttctatcctctcatgtggttgagcattcttacagccaaatgactaaattggctgtaaattggtttctaggaggagcagctgtcactacgtgtgatgtataatatttagccagggccaactcaggggctgtgtcatttgtcctatctttaaattgaggtcagagtgtcacacacaacccctcccctggggcagggtggactggactaggttgcatacgctggctgtcagctcagcaaaaatgccacatggggcttgtcactccgccagacactcactgactcacgggctggcaggtcacgctcggttagcgctccagggcctgactctggattgagctaaactggcagaatccactcaggccaacccttggtctactgctgtgtacagacagcccagtcctgtgttgagtctctcttctcctggatgaccctgcaaaaggaagagaccagttgtactgtgggcttagttctgggtttccactgcacactgacacgtgccagcaagggtagctgtggaaaacacgtatcaggagagcagagtagtctggatgaatactctgtgctgatcagaacgggctcggtcataatttaggagtggagctgatgtgtctgtcctgcctcagtgcagaatattccaggcttcttgaccagggttatgttcacccatctcccaacacacacatgcacacatgaaaacaaaaacatggtaactcttttggttcggcacaccatacaaaacgtgctttggggcgaggagtgctgtttcttttaacacttgtagaggaatatcctgagaagtgaacctgggctttgggagagctcagctgagaattctgttgacattttctttcccttgacaaggcttcaggttcgtctcactatagggagctggctgtgaaaatcagtaataacttgtcaagaagcagtgaaaaatgcgggggggtggaaagagcctaggtaactaatgtcttataatgcatatgtatgtaaatattacaggatttaaggttgaattttttaaaaagaaagttatagtctgtaatttccatttgttataataatgacctttaatcttgtcatttggaaccataaagcatttttatcaggtacctctgttccaagggatttatgtcttagaccatagctgaattgaatgtttgcaaaacactgctataggataaggtggtctttagttttgaacgtgtgaaaggactgcacacttttcagccagggtttgagttactgcccagggtcatcgtctcaaagtaattcaaggagtgatttaacatcagcatttgaaatgtagtcttcatctcctgggatccataaaaaaatgtgaacagggaaatggtggctaagcagagcctgaaataataacttggcaaagaaatgagtttatcaggtcgagtcaaaacatggcatcccctgttacactcaagaaatgttttcttcatgtaaatgtttatacgggcatatataatcacaatgggaacagttaaaaccccctcccttcaaaaaaagaaaatctatatcagttgggtttggttttggttcttcattggctcaaggcagttaactgtctcagtatagccttcggggagatttaacctcattctagccatttttccatcctgaaggccaagaaggactattagaagggtttttgaggggtttcggaggtgagggcccaagacccccataatgacatcattaggcattcttgaaaggtgttaacagaccagcacgctcgatgtgttgtacccttcatttatttttttttctcagcatcccaagttgtccatcagtacattccccttcaccttacctgatcttcatttaatgcccagtctgtaactaatgttctgtttaaagctctcttaatttgttggctatgagtgatttgtgaatctgggatgtaaccctgagtgaggagaaaagggcattgagccagcataaatctgaatgggcagaagccacaaacaaatgggagcagaaaagaagggcgagctcccccgcgccgcaccccgtgtataatccagtgttaacctctgaggaacacctcggctctcccaactgaggagagacaaaagagggattctttttacacccaggctggcgcattttcaagtgacaatctcgggctctagttgcctttgagatatccactctgctctttctcccaggcctcagaccaagaaaaacatgctctcaagattagcccataggcagttcttgtgacctggctgaagaaagaaaggagacctgtttgttttaaaagtcgggcgcaaagtgtcaggtggctttgatttatgacagaaagaggaagaagaaagttggagtaatagcactatccaaataaccctgcccaggaaacttgggggtcaagagagcttatcaagagccttttataggtaagctcttccgtgtgaaagagaaaaggccggaaagagggagagagcccagagagcaggctgcgaactcacttccaatgggattggagtctgttgtattcttaagagatagcctgatatgtggtttataggtgaatcaataaacaccaacaacaacaaaaaaaaaaaaaaaaaaaaaggaagaaaagaaaaaaaggaaaccagccctgtcatggaatttctctccttccctgcacagtaaagacttttgggttttcatggataaaatcaatgtcagtactgaaactcctactctcccctcccgccccactctcccccgttgcccgagatggccaagttcaggcctgtgcaatgccgcttccctctgagcctccctctcaagggccacgcaggcagctgcagcagggccagctgcaggatggggctgccggtcactgaattgtcgttcaaatgcatcatctttgtggcgtctttctcatgcgagcaaagccacgtgctctcctgtctgctgtcacatctgtgcctggattgcttaaatattgtttgtgatggggaggttttaatctggtgatgcagagggaagcagggctgtgggggcacgtttaattggctcccagcagcgtggggggtgcttctatggtgtgtggggttttttgttgcctccctctagaagtgttaccgttttcacgtcctattaatgtcctctggttgttaaattacagcagcacattacagtgcactgggttccctcctggagtgaatacaaacggagggcatctacttgtatttttagaagttttgggagaatttagtgatttgtggctttgatcaatcctgttgactggtgtatgtctgcgcaaacctgtttcaaataaatcttttgttaaagtaa

SEQ ID NO: 29 - DNA, 35540 bp, synthetic construct
  source 1..35540: mol_type = other DNA
atttcgggcgctgctgtgaagctgaaaccggagccggtccgctgggcggcgggcgccgggggccggaggggcgcgcgcggcggcggcaccccagcgtttaggcgcggaggcagccatggcgggcaacttcgactcggaggagcggagtagctggtactgggggaggttgagtcggcaggaggcggtggcgctgctgcagggccagcggcacggggtgttcctggtgcgggactcgagcaccagccccggggactatgtgctcagcgtctcagagaactcgcgcgtctcccactacatcatcaacagcagcggcccgcgcccgccggtgccaccgtcgcccgcccagcctccgcccggtgagggactgacgggacggcgggccctgggcggggtgagggccgcggaactcccagcctggctggctggtcctcgagagcggaccctcgggggtcgtgggcagagggctgggtgaccgtggcaggggcccgccggctgctcgggctcgctctcacccggggagcaggagtgtgggggaggaggagccgcggaccgaggccccggggtgtgcctggggagggcagccgcggggaaggggaactgcttcggccccagggtggggctggctcccgggccaggcgcaagggtagggcagggcaaggcaacgtggggacaaagagctgagggagatgttggcactgcgggggcatcacttggcagcggcgcccagaatgaatccgataatcctacaagtggcttttaggctggaaacgtttcctgccgtgttggagagccgggtttggccgtgctcccctggtggcctttggtaggaagtcaccacatactggccgggagggatggagacaccctcaggaaaccggtcaattttttcctttcttgggcatttttccaaaatctttgtaccgttctcttcccccgtggaggacgaaggtggtgaactaagtgctagaagaaatagtggtagcagaaagccttcagtgaccagcccaacccagtttaaggcgatgcctggctatgtgcaagagatctaagcgtccagaagactgtccgccgttagagagttctggttttcaaagtgtttagtggaggaaagacattttattccacaaaataaaccagaagtgaggcaatggaaacagacccttccctgtaagtgactggaacttcattttccttggacttaaacattgtcggtgtgtacttcagggcgtcaccttgctcagtaagatggggctgcgggctgagtcttcctggatattgggaacagactctacgccaagaacataaattacctgcgctgggttttccttgccagggagggatccctgagattgactgtcttaccgatgccgttggagttgatttgggactgttttaagggaatagatagatgcccttagtactggagatttgtgaggtacaaagtaattctggggttctcattgtatgtgtacctgtgtaacagcatcaggagtcctcgtgccttcacgctgttgccaagtcgaagcagtttcttcttggccagctgagaatgggttcagactagtctcatatgaatcaggaagctcttgagccgtcctttgtagacttgcccttgtagaatagttctaatttagatttactcgctccggccagaaatagagaattggataggcagtctctttgttaacacacaccaatttttattttactcttttctaagacggagtcttgctctgtcacccacgctggagcacagtggcgcaatctcggctcacggcgattctcctgtctcagtctcccaagtagctgggattacaggcacccgccaccataaccagctaatgttgtatttttcgtagagacgaagtttcaccaggttggccaggctggtctcgaactcctgacctcaggtgatccaccagcctcggcctcccaaagtgctgggattacaggcaagagccaccgcgcctggccaacacatactaatttttttaaaatttttcttatttatttcttacttatttatttattttgagacggagtctctctgtcgcccaggctggagtgcagtggcgcgatcttggctcactgcaacctttgccttttgggttcaagtgattctgcctcagcctcctgagtagctgggattgctggtgtgcatcaccaccacgcccagctaattttttgtatttttagtagagatggggttttaccaggttggccagattggtcttgaactcctgatctcaggtgatccactcgcctttgcctcccaaaatgctgggattacaggcgtgggccaccgcacccagctttgtttgtttgaggcggagtttcgcttttgttgcccaggctggagtgcgatggtgcaatctcagctcactgcaatctctacctccccgggttcaaaggattctcctgtctcagcctccctagtagctgggattacaggcacactccactacgcctggctagtttttgtatttttagtagggttggggtttcgccaagttgaccaggctggtctcgaactcctgacctcaggtgatctgcccacctcagactcccaaagtgttgggattacaggcgtgagccaccacacccagtctaacacaaccattttttaaaaatgagtatggggtctataagctcacaaattatcctagatctttctcattgtggcctgtttaatagtattatgagatgggaatattgatgtacctgtgttggccctgaaccagatatattctactttgatgccacctgcatagtatctggggttttgcattatatgtcgtcacatgatggcaaactgtcattgaaactcacttttcagccttttgtttgtgtttgttggttgccaaagttgaaaatggcagcaggcaggtttgttagtttgatattttttcatatcttagcataacgattttatgtctcaacacttaccgtgataatcgagcaccaccttttcaaaacagataagaactcagttccttggctgaggaaagacggtgaagattgccaaagtttatggatggggtgtggaaaattcacgagtattgtgataattctttctgccatgttgtaccccattttctacgattcagttgctgtctttttctctcttctgagacagagcctctgtcacccaagctggagtgcagtggcatgaacacagctcactgcagccttgacctcctgggctcaagccatcctcccacttcatcctcctgagtagctgggactccaggcgtatccaccatgcctggttaactgttgaaaatttttttgtagagatgaggggtctcacggtattgtccaggctggtctcaaattcctgatctcaatagacttcatgcttcaggctcccaaagttttggaactgcaggtgtgagccactgtgcctggtcagttgctgtctttttttttttttttctttttgagaccgagtttttactcttgtctcccacgctggagcgcaatggcgcgatattggcccactgcaacctctgccttctaggtttaatcaattctcctgcctcagcctcctgagtagctggaattacaggcgcccaccaccatgctcagctaatttttgtatttttttagtagagatggggtttcaccatgttggccaggctggtctcgaactgctgaactctgatcatccacccacctcggcctcccaaagtgctgggattacagacgtgagccaccagcgcctggcctgtctgtataacctcagaattactttgtacctcacaaatctcaagtactaagtactgaatctttgttctccccctcaccaagtccttttgaagtcacacagagaaatttcttgaattttttagagaggcgtatagaatattaataactaatgtttattgactggttattctgtgccaggtactttgagtactttatgtaccttatttcacttactgtctaggacaatctagtgagataagtaatatgatctccatttattaaaatattcccattttatacaggaggaaacactcatagattcagtaacttgcttaaggtcacacaactaataaatgactttcagaagttgaacctaggcattctgacctgagagctgacccttttacactacactctcaaagccagcgttcttttggcatctcagcagtgcacatagaggtccgtatcctcaatatcctcaatactttgcctctgccctggagtctaagacttggtgttttttgttttgttgtttttggatggagtttcgctcttgccccccgggctgctacagtgcagtggtgcagtctcggctcactgaaacctctgcttcccaggttcaagtgattctcctgcctcagcctcccgagtagctgggattacaggcatgtgccactgtgcccagctaatttttttttttgtatttttagtagacacggggtttcaccatgttggccaggctggtctcgaactcctgacctcaggtgatccgcccacctcggccttgtgttttttgtttttttttccccccactatgttgcccaaactggagtgcagtggctgttgacaggcacagtcatagtgcactacagcccttaactttggggcaggcagcccttctgactcaggctgtgagtagctgggactacaggcacatacagccgcatccagcccaggttttttaaagaccagaattaaagaatggcaagaagaggccgggcgcagtggctcatgcctgtaattccagcactttgagaggccaaggagggtggatcacttgaggtcaagagttcgagaccagcctggccaacatggtgaaaccttgtttctactaaaaaatacaaaaattagctgggcgtggtggcggacgcctgtaatcctagctgctggagaggctaaggcacgagaatcgcttgaaccccggaggcagaggttgcagtgagctgagatcgtgccactggctttattattcagacaatacacatctgctatctaaagtcaatgatgaagaagctttttaaaattgttattgctttttttttttttttttttgagacagtttctcgctctgtcaccgaggctggagtatagtggcacgacctcggctcactgcaagctccgccccgtggggttcatgccattctcctacctcagcctcccgagtagctgggactacaggcgcccgccaccacgcccggctaattttttgtatttttagtggagatggggtttcaccgtgttagccaggatggtctcgatctcctgaccttgtgatctgcctgcctcggcctcctaaagtgctgggattacaggtgtgagccaccgcgcccggcctatttgttttgttttgttttgtttgagagggagtttcgctcttgttgccccgtctggagtgcagtggcgcgatctcagctcactgtaccctccacctcctgggttcaagcagttctcctgccttagtctcccaaatagctgggattacaggcatgcgccaccatgcccagccaatttttttgtatttttagtacagacggggttttgccacgttgtccaggctggtcttgaactcctggcctcaagtgatccgctcgcctcggcttccccaaagtgctgggattacaggtgtgagccatcgcatctagcctacagagtatattttgtttacacagtgcataggtgaaaattatatggaatggcttaggtgtcatttttatgtgttttttttctttttttgagacagaatctcgctctgtcgcccacgccgggccggagggcagtggcgcgatctcggctcactgaaagctccgcctgccgggttcacgtcattctcctccctcagcctcctgagcagctgggactacaggcgcccgccactatgcccggctaattttttgtatttttagtagagaggtgtttcaccgtgttagccaggatggtcttgagctcctgacctcgtgatccgcccaccttggcctcccaaagtgctgggattacaggcctgagccaccgcgccttattttttaaactttatttatgttttgagacagagtcttgctctgttgcccaggctggagtgcagtgggacgatctcagctcactgcaacctccccctcccgggtcaagccattctcctgcctcagcctcttgagtaggtagctgggattacaggcatgcgccaccactcccagctaatttttttgtatttttagtagagatgggggtttcaccatgttggccaggctggtctcgatctcctgacctcaagtaatccacctgccttgacctcccaaagtgttaggattacaggcgtgagccaccgtgcgcagctgggtattatttttaaaggcatgggtacagaatgggccagtgattctcagccttttccgttgaacctgtttttaacttgtcttgggtcctcagcttgcataggcttcctgtggtgccatagcttgggagttccctggggccataaggaagggcttggccaagtctactggtcacattctgtcaggttgggcttcaagatggacctccttggaatgcttgcaagaaactagttttttttctcttgaacagctaaacctttcaggttgacacagctgaaggagtgtgagttaggagagtcgttataagcttgagctgtggatcctgggttgggccttatttacctaccacttactgcttgtgtaactttgggcaaattgtttaacttttccctgcttcagtttcctcatctgtgaaggagggaaatagtaatactgatctcatagggttgttggaatgatactccatattcagtactggcatactaagtactccataagcatttcatgtatacgaatcttaataacataactgaggtgtgggggcttttgaagcaaaatggaaaacttcttatctttgagaggctgtggaattcatgctgtggatggtaggaactggtgaaacagtttgtcttggggagtaggtgcctgggtggagtgcatccgtaagtgtgaaaggacctcgggtccagcacttggaaataagatggtgcctcctgttacctgctcatccgacctgttgcgctagtgggtggaggggggcataaaacgtgcttcattttgaaggcgtgggacagaagctagggtggtaatagtttgtgatactccctcgaggtagtgaagagctacatgccaggctggcagctgggccaagccacttctggaggtagcgtgagactgctgatggccctgttgctcaggctggtgtgcagtggctccgtcatagctcactacagcctcactgtatgacccaggctgggcttgcactcctggcctcaacagatgtctccctaaagattggttaatcagtttttaaaaatagagaaaaaaataaagagatcctcctgcctcagcctcccaaagtgctgagattacaggtgtgagccaccgcacctgcctgaccacagaacttttgagaagcatcttgagatcctgtggaattttctctgggaaacggtccagtgggctctggatttgaggatgaattgaaaattgctgaaggaatttggagaattggttgctttttattgagcacctataatgtacgagccactttttcttttttttttttttttttttttgagatggagtcttgctctcacccaggctggagtgcaatggcatattctcggctcactgcaagctctgcctcccaggttcaggcagttctcctgcctcagcctccccagcagctgggactacaggcgtgcaccaccatgcccagctaatttttgcatttttagtagagatgggtttcaccatgttgatcaggctggtcttgaactcctgacctcagtgatttgcctggctctgccacccaaagtactgggattacaggcgtgaacccccacgcccagcctctagccactttaggaactttatttattagataggtatttgaccccattttgcagagtcgggggtgaggcacacagaagttaggtaactcagacagctagaaaatgagagccacaatgcaccaaacctgcaaaggaccgtcctcatacccaccatctttagaacattctatttgcttaggagaccatatatcttctcagatggaaaccagtggccttctgtcgcccaggctggagtgcagtggcgcgatctctgctcactgcaagttccgcctcccgggttcaagcgattctcctgcctcagcctcccgagccagtggcctttttagcgttttgtattggtgggtatttatctaagcaacccctgtaaataccacaggcagagaaggaagggagggagcaagaattgaggaaaaaagggaaaagagggccgggtgtggtggctcgcgcctgtaatcccagcactttgggaggctgaggctggctgatcacttgaggtcaggagttcgagaccagcctggccaacatggcaaaaccctgtctttcctaaaaatacaagaattagccaggtgtggtggtgggcgcctgtaatcccagctactcgagaggctaaggaagggagaattgcttgaacccaggaggcaggaggcagaggttgcagtgagctgagatcgcaccactgtactccagcctgggcaacagagggagactccgtctcaaaaaaaaaaaaaaaaaaaggaaaagagaaagtgctgtgagatcaaggagagcctggcccgctcttgtagacccgtcagaagtgattgggcctattttagcccacagagccctcaggtgttcttcatgaaaccttcagggagggagtggccttgtaaaaatggtcgtaacctgaggcttgaaatgcttggaaggcttagaagtaacgggctgagcaggtaccgagaagctgaaaggatatcctctccttgcattgattttgatttccgtttgtgtgacttcctaactccacgttcagaatccagcacagggtgatgtagaacaagtcattgaggttttccaagtcccagatagctatgagaatcctgtcgttgcttctgttctctagactggctgactgtgcctccttcctttcccgcccttctatttcctgcctttggctgtttgtggttggaaggagaggaaagagagaaaaggagccggaacacacagccatggtgaggtttgggcttatctgggacttatgtgtgttctgttctcctcccttccttctggagtttggatcaatgaagcttgatggcccccagcagttcacagaaacgggcatttctctgtgaaattattacagtgtcagaatagaaaaataatttataagtaaagtacatcaaaggttttccgtggcgttttgcttacgtttctgtgtctattgggattgccaaacaaaaagaaagtcacggccgggcgtggtggctcacgcctgtaatcccagcactttgggaggccgaggcgggcggatcacgaggtcaggagatcgagaccatcctggttaacacggtgaaaccccgtctctactagaaatacagaaaaaaaaacccgggcgtggtggcgggcacctgtagtcccagctgctcgggaggctgaggcaggagaatggcgtgaacccaggaagcggagcttgcagtgagccgagatggcgccactgcagtccagcctaggcgaaagagcgagactccgcctcaaaaaaaaaaaaaaaaaaagtcatagtgagcccagttcacgctattgtggcatttgaccaagaagagaattaaacctgcttcctacctttgcgccagatgatctgccaagttttctctcactcatctttcagagcgacttggcttagtagtctcatttgttctttccccgccaaaatgtatttcgctcggcctgctatggtaacagtggctggcagggggtggttaccttccttcttccagtggagagagtaccttggaagtgttcacagatggtcgtagttgctcatggcgattctgttgtatctcaggacacagtgcgttattccaactgtctttagcaggaacatagatccaggtgaaggtgaaagccgggtgggaggttgtcttcctaagacgtgccgctttctccttgttcaccagccacactgtgcttgctgtgttatctccaacaatgctgtgaacttctctgagcttctccagtctaggaaggcattgtgcttagcttctttccatcacttcagagttaggcttattaagataatatctggctgggcgcggtggctcatgcctgtcatcccagtactttgggaggccgaggcaggcagatcacaaggtcaagagatcaagaccatcctggccaacatggtgaaaccccatctcttctaaaaatataaaaattagcaacacttaactgagcactgacctgccaaccactgtcccaaaaggacaactaatagaacaccttggcatgtagttgggtaaaccttagcaagggagcttttctccacccagctgtgatcagaaccatttctaagccatgggtgcccaggtggcctccttaccactctgccctagagttttcttgaccaggcagtgctaagtaggtccctatgcgctcacactgaccctgtcctaaacagtttctccataggcctgaaagatcacccagaattagcctaatggtgataggcaaggtagccatgaatctccttgactaccagacttgaataggaattattctccatcagtgatcctcctcaataaagagaatctccagaatatagcacctccgtgctctgctacagtcataaccaaaatcccctctccagtcctgccctcggaacttttgcgatcatcttctattggtgcatgaggagtgtttgccatagaggacagtcctggcactcgcacccctttcagtgtcttaaattggagagacagccagtattcctgagtctgggctgttcactgttttaagctgacagctgtgaattccacaggtggactttgggtaatatgaaaaatgtacggctctccttcagatggtctcatcattcatttggatggaaagagaaggcactcatcagtactctttctaccggaaggacttttcattggcttccaaagttaacattgtgtcttattacctctctccaatagtggaatgatttttttttttttttgacggtgtctcgctctgtcgcccaggctggagtacagtggcgcgatcttggctcactgcaagctctgcctcccaggttcatgccattctcctgcctcagcctcccgagtagctgggactacaggcgcccgccaccatgcccggctaattttttgtatttttagtagagacagggtttcaccatgttagccagggtggtctggatctcctgacctcgtgatccgcctgcctcggcctcccagagtgctgggattacaggcatgagccatcgtgcctggcccctatgccattcttttttttttttttttcttttgagatggagttctgctcttgttgcccaggctggagtgcaatggtgcgatctcagctcaccgcagcctccacctcccgggttccagcgattctcctgcctcagcctcccaagtagctgggattacaggcatgagactcacgcctggctaattttgtatttttttttttagtaaagacggggtttctccatgttggtcaggctgctctcgaactcccgatctcaggtgatccccccccccgcttcggcttcccaaagtgctgggattacaggcctgagccaccacgcccagctttttttatttttttaattgagacaggctctccctctgttacccaggctggagggcagtggcgcagtcttgactcactgcaggctccgcctcccaggttcaagcaatccacctcagcctccgaagtagctgggactaaaggcgcgcaccaccctgcctggcgtttgtatttttttcggtagagatgggttcttactgtgtgttagccaggatgtttctaacattgaacgaaataattaggtctttagctgggcgtggtggtgcacacctatggtcccagctacccaggagtctgaggcaggaggatgactccaggccaggagtacaaggccacagtgtgcagtgatggtgtctgtgcatagctactgcagtttagcttgggcagcaaaaacctgctctcaaaattaacaagaccaggcacggtggctcatgcctataatcccaacactttgggaggccaagggggaagaggattactttgagctcaggagatcaagacctgcctgggcgacatggcaaaaccccgttattaaaaaaaaaaaataggccaggcggggtggctcacgcctgtaatcccagcactttgggaggccgaggcgggcggatcacaaggtcaggagttcaagaccagcctggccaatatggtgaaactccatctctactaaaaatacaaaaaaattagccgggcgtggtggcgggtgcctataatcccagctacttgggaggctgaggcaggagaattgcatgaacccaggaggcagaggttgcattgagccgagatcctgccactgcactccagcctgggcaacagaaagagactccatctcaaaaaataaaaaaaagtggggctgggcgcggtggctcacgcctgtaattccagcactttaggaggccgaggtgggtggatcacgaggtcaggagatcgaaaccatcctggctaacatggtgaaaccccgtctctactaaaaaatacaaaaaaaaattagccgggcgtggtggcgggcgcctgtagtcccagctacttgggaggctgaggcaggagaatggcgtgaacctgggaggcagagcttgcagtgagccaagattgcaccactgccctccatcctgggcaacagtgagactctgtctcaaaaaaatgataataaagtaaaaataaaaaatacaaaaattagctgtgtgttggtgggtggcttgtgcctatagtcccagctatttgggaggctgagactgtagaattgcttaagcctagaaagtggaggctgcggccgggtgcagtggctcacacctgtaatcccaacactttgagaggctgaagtcggtgggatcacctgaggtcaggagttcgagaccagccttgccaacgtggtgaaacccccatctctactaaaaatataaaaaattaccttggtgtcgtggtggccgcctgtaatctcagttacttgggaagctgaggcaagagaatcacttgaacccaggagagagaggttgcagtgagccaggatcgcaccactgcactccagcctgggcaacagagcaagagtccgtctcaaaaaaaaaaaagaaagaaagggaggttgctgtgagctgagtttgcgccactgcactccagcctggacagcagagtgagaccctgtcacataccaggcacagtggctcacgcctgtcatcccagcacttttggaggccaaggcggtcagatcacttgaggtcaggagtttgagaccagccaggccaacatggtgaaactgtgtctctactgaaattacaaaaattagccaggcatggtggcacacacctgtatcccagctacttggggcgctgaggcagaagaattgcttgaacacagagggtggaggttgcagtgagccgacatccagccactgcactccagcttgggagacagagcaagactctgtcttcaaaaaaaaaaaaaaaaaagaccctttcacacacaagaaaaatcccaataagcaaataattaaaattaataatggctggatgcagtggctcacatataattaaaattaataataggctggatgcagtggctcacatctgtaatctcagtacggcactggctcacatctgcaatctcagtactgcagtggtgcacatctgcaatctcagtactctgggaggccaaggtgggccgatcacttgagcccaggagtttgagaccagcgtgggcaacatagcaaaaccccatctccacaaaaaatacaaaaactggccaggtgtggtgtgcgcctatagtcccagttgctcaggaggctgaggtgggaggattactagagcctaggaagtggaggctgcagtgagctgagattatgccactgcacccctgcctgggtgacagaacaagaccctgtctcaaaaaaaaaaaaaacaggccgggcgccctggctcacacctctaaacccagcactttcggaggcagaggcaagtggatctctggagctcaggagttcaagaccagcctgggcaacatggtgaaaccctgtctctacaaaaaatacaaaaaaaaatacaggcatggtagtgcatgcctgtagtcccagcgacttgggaggctgaggtgaaagaatggcttgagcccaggaagtggaggtttcagtgagccaagatcatgccactgcactccagcctgggccacagagccagaccctatctcagaaaacaaaaacaaaaccgcagcctgggcagtaaagcaagacactgtctctataaaaaaaatttcaaaatcagctgggtgaagggccgggcacagtggctcacgcctgtaatcccagcactttgggaggccgaggtggatggatcacgaggtcaggagttgtagaccagcctggccaagatggtgaaaccttgtctctactaaaaatacaaaaattagccgggtgtggtggcgcgggcctgtagtcccagctactcgggaggctgaggcaggagagttgcttgaacccgggaggtggaggttgccgtgagccaagatggctccagtgcactccagcctgggtgacaagaatgtgactccatctcaaaaaaaaaaatcagctgggtgcaatgccacccgcacctttagtcccagctactcagaaggctgaggtgggagaatatcttgagcccaggagtttgagactgcggtgagctgtgatcacactactgcactccagcttggacaacagagttagaccctgtctctaaaaagaaataacaaaatcatgtactcaggagactaaggtgagaggatcgctggacccaggagtttaagatgagcctgggccacatagggagtctcctgtctcaaaaaacaaagccaaggccaggcgtggtggctcacgcctgtaatactagcactttgggaggccaaggcagatggataacttgagctcaggaattcgagactggcttgggcaacatggcgaaatcccattactacaaaaaattagttgggcgtggtgatgcgtgcctgtaggcccagctactcaggaggctgaggtaagaggatggcttcagcctgggaggtagaggttgcactcagctgaggtctgcactcccgcctgggtgacagagccagaccactctgtcacaagacaacaacaaagccaaaaactcacaaaactcatttggattttaggttttttgagacaaggtctctctcttttgcccaggctggaatgcagtggcatgatcacgactcacggtagccttgactccctgggctcaggcgattctcccacctcagcttctcgagaagctgggactaacagacatgcaccaccttgcctggctaatggtttttttgtttgtttgtttgtttgtttttgagacgaagtctcgctctcctgtcctcatgatccacccgcctcggcctcccaaagtgctgggattacaggtgtgagccacgtgcccggcttgttttttgtttttttaggagattgggtctcactttattgcccaggctggtcttgaactactggcctcaatcagtcctcctgccttggcctcccaaagtgctgggattacagacgtaaaccactgtgcccagtcattttttttcaaacatttattttttctttttttaagagtcaaggtcttgctcggtcccccaggctggagtgcgttgacacgatcatggctcagtgtactcacaaactcctaggctcaagcgatctctcacctcagcctcccaagtagctgcaactgcaggcatgcaccactatgcctggctaattttttttttttttttgagacagagtcccgctctgtcgcccaggctggagtgcagtggcgcgatctcggctcaccgcaagctctgcctcctgggttcatgccattctcctgcctcagcctccctagcagctgggactacaggtgcccaccaccacgcccagctaattttttgtatttttagtagagacggggtttcaccgtgttagccaggatggtcttgatctcctgaccttgtgatccacctgcctcagcctcccaaagtgctgggattacaggcgtgagccaccgcgcctgtccaacctggctaatttttaaataatttttgtagtgatgaggtcttggctgtgttgcctacgctggtctcaaaatcctgcacttaagtgatcctcccacctcagcctcctaaagttctaggattacaggtgtgaggcaccacgcccaacaaaattcattttcttttttttgtttgtttgacacagagtcttgctctgttgcccaggctggagtgcagtggcgtgatcatggctcactgtagccttgaccttccaggctcaagccatccccctacctgagtgtcctgagtagctgggactacaaaagtgtgccaccatgcccagctaattttttaagttttttgcagtgacagccatgttgcccgggttggtcttgaactcctgagctccagggatccacctgcctcagcttccctaagtgctggggttagagatgtgagcaaccgtgcccagctaaaactcattctctatggagaatgtttactagttgttattattagagagttgtttattacttcttcaggaaaccataatgtgaaaaatccaatgaaaatagtttgctgttttgggtgcttagccgagtgggagttaaaggtttgcattcctaattagaaactttgtggccgggtgcagtggcccacacctgtaatcaatcccagcactttgggaggccgaggcgggtggatcactaggtcaggagatcgagaccatcctggctaacacggtaaaaccccgtctctattaaaaatacaaaaaaaattagccaggcatggtggcgggtgcctgtagtcccagctactcgggaggctgaggcaggagaatgacgtgaacccgggaggcgaagcttgcactgagtcgagattgtgccactgcacgccagcctgggggacagagcgagactccgtcgtggtgtcccacacctatgatcccaaaacttggggaagccgaaatcctaacaatcccgggagttcaccagtctgggcaacgtggtgaaaccccatctctacaaaaaatacaaaaattagccgggcgtggtggcgtgtgcctgtatttgaagctattcgtgaggctgggtgggaggcttgcttgaggctgaggctgcagttagctatgatcatgccactgcactccagcctgcgtgacacagcaaaaccctgactcatttttttttttttaaagaaactttgactcttgtttgaatttactcgttttgtttgactgtgttcatttattttccttgagttttagaatctcagcatagaataaatccattctgaactatggtatgtagggccaccatacacactcgtgtcttaggaattttaagcgtttgtaatatgttctttctctggatcctcagtgtgttatcagatgttgagtgttttaaccctttatttccccaagcattttttttttaatgacctgtttgcttcatagcgaacagtctagtttctgttttatttacgatctcgggaattgatttttaagcagttagccccttagtttttcagttcagcttcttggttcttttaccttttagctgtcaaagataaaattgagatcacctatcttagatttaaaaagataccagaggccaggcactgtggctcatccctgtaatcccaacactttggaaggttgaggccgaaggattgcttgagcccaggtgtttgagactagcctgggcaacatagtgaaaccccatctctacaaaatatttaaaaattacccagatatggttgagcgtgcctgtagtcccagctgctcaggaggctgaagtgggaggattacttgagcctgggaggtcaaggctgcagtaagctgtgattgtgccactgcactccagcttgagcgacacagcgagactctgtcccaaaaacaacgaaaaccacaacaagagatagtttttcttcttcggaattatacattctagatgtgaagagaaaaaatgtgtgagctcagtgcagacacaagctctctccaccttctgaacagcagcagggacccatgaaaaacaagagcttgctacatttcctgaggttgaaaagtagatgcaggccaggcgcagtagctcacacctgtaatcccagcactttgggaggctgaggtgggtggatcacctgagatcaggagtttgagaccagcctggccaacatggtgaaaccccgtctctactaaaaatacaaaaaaaaaaaaaaaaattagcttgtcatggtggtgggagcctgtaatcctagctactcaggaggctgagacgggagaatcgcttgaacccgggaggcagaggttgcagtgagcagagatcacgccactacactccagcctgggcgacacagtgagatttggtctcaaaaaaaaaaaaacatgcaacagaaccttgaggcttacactgctctgtaaatggggtagcgacagaacatatttggagaatgcagtgaaagcccccgtcgttgatcaagtatgagagcacgtcctgatcagcctagtctcctggcctcctcatccttccctggggctgtagtgatgggcatctttcttcccaggggatgtttcagcttccaaatgtgatgttggtgtgctgtgaagagaaggggttattttttctagagttttttttgctgattaaatcttgactaaatgtgtatgaggcatgcatgaaagctccatttcggccaggcacagtggtgggctcctgtagtcccagctactcaggagtttgtggtgagaggatcacttgagccccggaggtcaagaccagcctgggtaacatagtgagatcccaactctaaaaaaaataaaaataaaatctgcatttcatttccagtgtagtacatcattaaataacagcctgctctgttttttccaggggtgagcccctccagactccgaataggagatcaagagtttgattcattgcctgctttactggaattctacaaaatacactatttggacactacaacgttgatagaaccagtttccagatccaggcagggtagtggagtgattctcaggcaggaggaggcggagtatgtgcgagccctctttgactttaatgggaatgatgaggaagatcttccctttaagaaaggagacatcttgagaatccgggacaagcctgaagagcagtggtggaatgcggaggacagcgaaggcaagagagggatgattccagtcccttacgtcgagaagtatagacctgcctccgcctcagtatcggctctgattggaggtaaccaggagggttcccacccacagccactgggtgggccggagcctgggccctatgcccaacccagcgtcaacactccgctccctaacctccagaatgggcccatatatgccagggttatccagaagcgagtccccaatgcctacgacaagacagccttggctttggaggtacataacgtgcacaatgtagaaagaagagatctgctgcagggtctcctctcggtcctcttagagctttgtagcaatgctgactacagcattgggatgttgtagatggcaagccgctaagcactgatgttggcattgaatgttgggttttctcttcttcatagaaaacctgtttgggaatgagtaagcttaaaactgtataactgaatgttcttaattgatctactaaacacacttggactactttaataacaccacctgaattcacaggaattaacctcaaatgtttttcctcatctacatcctcatctgtttcttgctttctgtttgtcgttgtctaaaagaaggtgggttcagatggatttgagtgtaataagtggtctctatcaaagcacttaaatggaattttcccgcaaaaacttgtttttgcttcaggggacttgaagttccttaccactaatgttcattgagtagaatccgggaggaaataggcctagtagaggtttgaagagatgcacacccagaagtcctcattccgaggagtggcaggtgcacgggtctttctaaatcattcaaaaagccagttcttcctcaggaattaatttttgcctttactgatgaaatatctttggcagcccacttccttctggccagccattacatggtgttaattcctttattcctctcttccacgctcacaccttgctctcctacctccttcctttcttcttccttcctccctctctcccttcctttcttttcagaagaattgatggttcagtgtaaaagctagtacagactgggcacagtggctcacacttgtaatcctagtgctctgggaggctaaggcaggaagaccacttgagaccaggtgttcaagaccagtctgggaaacatagacctcagctttttttaacaaaaagtgaaaaaaaaaaatcaccaggcgtggtggcatgcacctgcagtcctggcttgaatgagaaatggaatgtatgttgtcagagttatcactgcctcttgttcccattccctgtttggaggaaaatagatttctaccctcaggtcttcctgtgagttcagatgacggtaacatctggcatggtgctgtgtgtatgatggatcttactcctttttattttcttttttttttttcctctctgcttttttttatttttatctggccttactgagtcactagatgtaactcttgacatttattacagactttattagcactgggttgaagtaagtatgaaaacatggaacaaaggctgggcgtgtggctcatacctgtaatcccagcaccttgggaggccgaggtgggcagatcacttgagctcaggagttggagaccggcctaggcaacatggcaaaacaccatctctacaaaaaattagctgggcatggtggcacgtgcctgtggtcccagctacttgggaggctgaggagggaggatcacctgagcctgaaaggtcatggctgaagtgagctgagatcatgacactgcactccagcctgggcgacagggtgagactctgtctcaaaaaaagaaaaagaaaaaaagccatggaacaagccagctgacccaggagaaaccagttatcatgtgaattttgcttctatttgcatttcctttctcagagatttaatcatgcctgccttaattagaggctttactgctcaaaaaaatggttgagcttctctacctgctgtgaaacacaaatctcattaaataaagatttgagtagaaaactagttttatgattttagtaagttttcctttttgatttgggtattgggtttttttggatttttttttttttttttggttctttttgagacgaaatctcactccatcgcccaggctggggtgcaatggcacgatctcggctcactgcaacctccgcctcccaggttcaagtgattcccctgcctcagtctcctgagtagttgggattacaggcataccccattgtgcctggctaatttttgtatttttagtagagacagggtttcaccttgttggccaggctggtctcaaactcctgacctcaggtgatccacccgcctcagcctcccaaagtgctgggattacaggtgtgagctgtcgtgcctggccaatttctagaaatgtctttatgttgagctaaaacatatgtactatgtgtggtcaccgctcatcaagggtatggggagcttagcttcaggcattatcagttgagctagagatctttgtgactcacaccagaaccagggtaaggcctatctcccaggattctgtgggatgttttttctgttcatgtggactgttaaatctcaaacactggcagctttccaccaatactacccatgccagtttcagtccatctctgatgcaggtgaattgttaaggctgaattgtcctcatttgtttccatcaatttgaaagactgtcgatgggccctagatacactacctgttacttagatcaggggtctgcaaaccttttctgtaaaggtttttgagggccttaaattctgtgtcccaactctgccattgtagcaagaaggaaatcatagataaaacaacagatgagcttgctgtgttccaataaagctgcaaaaacaacaggctgatgtttggccaggtgctgtgacttacgcctgtaatcccagcactttcggaggctgaggtgggaggatcgcttgagtccaggtgtttgaaaccagcctgggcaacatggtgagatccggtctctacaaaaaatgtttttaaaaattagccaggtgatctaaaaaaaaaaaaaaaaaaaaaaccatacatgctgggtgcggtggctcacgcctgtaatctcagcactttggaaggctgaggcaggcagatcacctgagatcaggagtttgagaccagcctgaccgatatgatgaaaccctgtctgtactaaaaatacaaaaattagccaggcgtggtggtgggcgcctgtaattccagctactcgggaggctaagacaggagaatcacttgaacccgggaggcagagatttcagtgagctgagatcgtgccatagcacttcagcctgggcaacaagagtgaaactccatctcaaaaaaaaaaaaaaaaaaaaaaaaaagccaggcgtggtggtgtgcacctgtggtctcagctgcttgggaggctgaggtaggaaaactgcttgagcctaggaggttggaagagaaggctcctgtgctgcctctctgtacttgctcttccctggttttgtgtgtatgaatttgtgtgtgcttcctgccctgagctcactgaaagcaagtctggatcaaggcatgttagcagtcagtgatgtgctgctggttggtagtagggacctagaaaagcagtcacctgggtttgcgccagcaaagaaaaccagttctgtgatgtcccctgtgtagtgaattccaaacattgataccatttgggttctgattttgttctcattatctctggaacgcattgatcagctgggtaatcttttgttcctgtaccaattctagatctgattgcaccaggatcgattagccttgaaaacgacacagagctagggaatagccagtgtttgttacgttccttgggagcaaagaaactgtagtaaccacattcagtcttctttatgaatgactccatgatacagccgggacttgcttcctaaaaaagtgaagatgaaaggatgcttgttatattttagtcaacttttctaggtgttttgtggattgtggttctttaggatatagtcttaagtccaccattctacttgatagcaaactctgtttaaatacctcaatcttatattgtctttgttcttcttttcttttttttttttttttgagacggagtctcgctttgttgcccaggctggagtgcagtggcgtgatctcggcgcactgcaagctccgcctcctgggctcatgccattctcctgcctcagccccccaagtagctgggactacaggcgcccgccaccacgcctggctaattttttatatttttagtagagatgaggtttcaccgtgttagccaggatggtctcgacctcctgacctcgtgatccacctgccttcgcctcccaaagtgctgggattacaggcgtgagccaccgcgcctggcctttttttttttttttttttaagacaaggtctcactctgtcacccaggctggagtacagtggcgtgatctcactctgcctcctgggttcaagtgattctcgtgcctcaacctcccgggtagctgggattacaggcatccaccaccacgcctggctaatttttttatttttagtagagatgggatttcgccacattggccaggctagtctcaaactcctggcctcaagcgatccgcctgcctcagcctcccaaagtgctgggattataggcatgagccaccccgcctggcctatgttgtctttattcttaaacattcagagtgcagtctcaaatcccatcccacagagctgtaagaagctcctaagaatgtgttacaggatgaggaggctgaggaccagcctggacagtaaaacagttcctctgtggtgagactcatcagtctctttgctgtagtgaggtctccctcttggaaagaaaggttaactaccttgtagtacttcaagtcctgtatgaagtctttgttgttcattggtaattcatattaggatttttctttcctatttataacttgaattttgaaatcagtagtgttagaactactgttattactacattcactgattagtacattcctttgtattgtcagattgtaacagttctggggcaagcactcggtttcacctttgtatttgaagtagtacaccctagtctggtcaacatggtgaaacccatcattacaagaattagccaagtgtggtgcacatgcctgtagtcccagatactctagtgactgagatgggaggatggcttcagcctgggaggtcaaggctggagtgagctatgattgcgctactgcagtccaggctaggcgacagagtgagactctgcctcaaaaaaaactagtacaccaagtttcttttttttttcttttgtatttttagtagagatggggtttcactgtgttagccaggatggtctcgatctcctgacctcgtgacccactcccctctgcctcccaaagtgctgagattacaggcgtgagccaccgccccggtatgatacccctcaccttccctgatctgatctttgggaattatgctttagtgaattaacaggtggaagcacagttctgactttgtttctgaattggaggaagaactgcatttactggagcaaaatgttcttagaatgccccaccccctccggccttcttcctctgccctcctccagccagagtcagcagccactccttcctccagactgttaaagacctaaggccacatgtggcaccacaggaagacctggtctctaaatatcatcatagtgcctttgggacctcaggagcattttcatgtgctctaaacgtttcaggagaaaggccccaaaaagcacaaagggttaatttgtttgtttgtttgtttgtttgttttgagacggagtctcactctgtcgcccaggctggagtgcagtgcgtgatctcggctcactgcgagctccgcctccagggttcacgctattctcctgcctcagcctccctagcagctgggactacaggcgcctgctaccacgcccggttaatttttttgtatttttagtagagacggggtttcaccgtgttagccaggatggtctcgatctgctgacctcgtgatccacccacctcggcctcccaaagtgctgggattacaggcatgagccacagcgcccggccatagggttaattttaacaaggtcttccttgaggtatttttacttcaaagccacgttggtcaggttaattagcccaattgattgcttacaaattttctttatccgtttaaaaatcagaatcaggctgggtgtggtggctcacgcctgtaatcccagcactttgggaggccaaggcgggcggatcacgaggtcaggaaatggagaccatcctggctaatactgtgaaatcccatctctactaaaaaaaaaaaaaatacaaaaaattagccggacgtggtggcgggcatctgtagtcccaggtactcgggaggctgaggcaggagaatggcgtgaacccgggaggcggagcttgcagtgagccaagatcgcgccactgcactccagcctgggcgacagagcgagactctgtctcaaaaaataatactaataatcagaatgagcccaggtacagtggttcacgcctgtaatcccagcactttgggaggtcgaggtgggtgaactcttcacctgaggtcaggaattcgagaccagcctgactaacattttgaaactccatttctatgaaaaagacaaaattagccaggcgtgggggcacacgcctgtaatcccaactacgtgggaggctgaggcaggagaatcacttgaacccgggaggtggaggttgcagtgagctgagattgtgccactgcactccagcctgggcaacaaaagcgaaactctgtctttaaaaaaaaaaaaaaatcatttgagttatggcatagccattatctcatctccgtatatttgaacctgtctgccaaaaacctaatcatctgtaaagaaaagattcgtgtttttggttgtttttctcttttttttttttgagatcaggctttgctctgttccccaagcaagggtgcccagttgtagctcactgcagccccaaactcctgggcttgtgatccccctacctcagcctcccaagtagctgggactacaggcacattccactgtacctggctaatgttgtacttttaattttgtagaaatggagtcttgctttgtaacctagactgatcttgaactcctggcttcaggcaatcttcctcctgctcgggcctcacaaagcactgggattataggtgtgagccactgcgtctggcctcttttttttttttttaagagagacagagtttcactgtgctgctgaggaaggcctcaaactcctgggctcagctgggcaaggtggcccatgcctataatcccagcactttgggaggccgagttgggcaaatcacttgaagtcaggagttgcataccagactgtccaatgtggtgaaacctggtctccactaaaaatacaaaaattaactgagcatggtggcgggcgcctataatcccaggtccttgggagcctaaggcacaagactccaggaggcggagtttgcaatgagacaagattgtgccactgcactccagcctgggtgagagatcaatacagtgtctcaaaaagaaaaaaaaaccctggactcaagggttcctctcccctcagtctcccaagtagctgggactacaggtgcaggccagcgtacccggtgtaaaaaaaaaagttttagattttggcatggttttcctctgcagggtagatccaagagaatctggctgggcacggtggctcacacctgtaatcccagcactttgggaggccaaggtgggcggatcacctgaggtcaggagttggagaccagcctggccaacatggtgaaaccccatctctactaaaaatgcgaaaaaattagccggacgtggtggcgtgcgccagtaatcccagctactcaggaggctgaggcaggagaatcgcttgaacccaggaggcggaggttgcagtgagctgagattgcgccactggactccagcctgggtgacaagagtgaggctccatctaaaaaaaaaagagagagaatctgtacattaaagatagttctgagccgggcgtggtggctcacgcctgtaatcccagcactttgggaggctgaggtgagcagatcacgaggtcaggagttcaagaccagcctggccaatatggtgaaaccccatctctactataaatacaaaaattagcagggcgtggtggcacatgcctgtagtcccagctactcaggaggctgaggcaggagaatcacttgaacctgggaggcagaggttgcagtgagctgagatcatgccactgtactctagccagggcaacagagtgagacgctgtctcaaaaaaaaaaaaaaaaaaaagatctgatatggtccaaaggtctaatttacacatagttcctttccccaataacatcttgcctcatagaaatccctactcatttatcccttagaagtctgaaagaagggctggcacggtggctcacacctgtaatcccagcacattgggaggccgaggtaggcagatcatgaagtcaggagatcgagaccatcctgcccaccatggtgaaaccccatctctactaaaaatacaaaaatcagctgggcgtggtggcgggcgcctgtagtcccagctactctggaggctgaggcaggagaatcatttgaatcctggaggcggaggttgcagtgagccagcatcgtaccactgcactccagcctgggtgacaagagcaaaaactccattaaaaaaaaaaaaaaaaaagtctgaaagaaaagatctggaggcacattagcaggttttgccccacattttgagaaattggtatggttctgtgttaacagcaaggggtggggctggtccacttttcaacctacccttcacctcttagagctttgtgggatgtgatttgagactgcagtatgaatgcttaagaataaagacaatataggctgggcgcggtggctgatgcctgtaattccagcactttgggaagccgaggtgggcgggtcatgaggtcaggagttcgagacaagcctgcccagcatggtgagaccccgtctctactaaaaatacgaaaaaagtactggctgggcatggtggcttgtgcttgtcgtcccagctacttgagagcctgaggcaggagaattgtttgaacctggcaggtggaggttgcagtgagccaagatagcgtcactgcactccagcctgggtgacagagtgagactctctctcaaacaaacaaaaagaataaagacaatataacattgaggtatttatttatttatttgagactgagtctcgctctgttacccaggctggagtgcagtggcgtgatctcggctcactgcaagctccgcctcctgggttcacaccattctcctgcctcagcctcccgagtaggtgggactacaggcgcccgccagcacgcctggctaattttttgtatttttagtagagacggggtttcaccgtgttagccaggatggtctggatctcctgacctcatgatctgccgccctcagcctcccaaagtgctgggattacaggcgtgagccaccgcgcccggccaagattcttttttttttttttttggagacagaatcttggtctctccaccagggtggggtgcagtggtgcacttggcttgctacagctcaaactcccaggctcaagtgatcctcctgcctcagcctcctgagtaactggaactacaggtgcatacgatgataccttactaatttttttttttttttcaagagacacagtcttgctattgttgcctagcctggctggggcatgtcagaatcttttttttttttttttttttttttttttttttttttttttttggagacagttttgctctgtcgcccaggctggagtgcactggtactatcttggctcactgcaatctctgcctcccgggctcaagtgatcctcccatgtcagcctcttgagtagctgggaccacaggcgcacactactatgcctggctaatttatttatttattttattttttgagacagtgtaactctgttggccaggctggagtgcagtggcacagtctcggctcactgcaacctcctcttcccaggttcaagcagttcactgcctcagcctcgcaagtagctgggattacaggcgcctgccaccacacctggctaatttttgtattttagtagagacggggtttcaccaatttggccaggctggtcttgaactcctgacgtcgtgattcactcacctcgacctcccaaagtgctgagattataggcgtgcgccaccacgcccagccaatttttttattttttgtagaaatgaggtttcactatggtgcccaggctggtcttgaactcctgagctcaagtgatcctcctacctcgcctcccaaagtgctgggattaaagacgtgagccccacagcaccctgcccagatgtgagaaacgttgaattctaaaattgctggcaggccaggtgtggtgagagtcctggtgacagcaacctgtgaggattgttacctgtgtgtaaggataggcatgccatcatcccttcctccccttcctccacacttgtgctcagctggcatcgtcacgacacaggctgggccatcatcccttcctctccttcctccacacgtgtgctcagccggcattgtcacgacacaggctgggttagctgcttggttttctctttttttgcagacagggtcttgttgcccaggctagggggcagccttgacctcccaggaggctcaggtgacctcctacctcagcctcccaagtaactgggaccacaggcgcacaccagcacgcttggccacgcttggccacacttggctttttaaatttttttgtagagacaagatctcactcttttgccagggctgctctcaaaatcatgggctcaagccatccccccacctcagtttcccaaagtgctgggattacaggcatgagccactgcaccaagcctgctgctatttttttctcaacctctgtgtcttatgtgtctctctatccccttctttctgtccctccttttctcagcatcctatgacccatacagtgacttcaggcctctgtaatttttagagagttcttcaggaaacaacagaggggccaataggcaagctgttccatctgtaagtgaggtcaggctgggcctggaagaggccctgcggctggacttacgttggctttggccagtagatgtgcctgcgtacatttttagggaacccagtacaagcccagatgcataatttgaaagttcctgatactgtatgaaatgcataaatggtgtggaggctcatgcctgtaattagctgggcatggtggcgtgcacctgtagtctcagctactcgggaggctaaggttggaggatcccatgagcccaagagttacaggctgcagtgagccatgatggtgtcagtgctctccagcctgagtgacagagtgagaccctgtctcaaaaacaaaagataaaaagatggccaggcgtggtggctcacacctgtaatcatagcactttgggaggccgaggcgggcggatcacgaggtcaggagatcgagaccatcttggctaacatggtgaaaccccatctctactaaacaaaatacaaaaaattagctgggcgtggtggcgggcggctgtagtcccagctactagggaggctgaggcaggagaatggcgtgaacccgggaggcagagcttgcagtgagctgagatagcgccactgcactccagcctgggcaacagatcgagactctgtcttaaaaaaacaaacaaaaaaaacctttatatttcattttgcaacaagagacattttataaataaatgccaaaacataaggtttttttttgtttttagaggcaggatctggctctgttgcccaggctggagtgcagtgatgtgatctcggctcactgcaacctctgcctcctgggctcaagcagtccacccacctcagcctcccgagtagctggttctatgagcagccaccaccacacccagctaatttttgtattttttgtagagacggtttcaccatgttgctcaggctggtctcaaaaactcctgagctgaagcaatccatccacctgtgtcaggctcaccaagtgctgggattgcaggcgtcagccactgcgcccggccatggttggtttttttgacccctcattgggtaatgatcaggtaacaagcggctttgagggagcagcaaggtctgtccgatggtgggatttgggggctgggcaggcagtggcttgtgaagtagagcttactgaatgaggtgggggttttctgggagctaattggacctggagttttggcctctacctgcccatatgggaaaaggcttgcctgggtcaggaggtgataggaacacttgattctctaggaccaagtgacctatgcttgccatgatcgctttctgctgtgcaagcagtaacaggccaggtcttgtgcgagtgggctgggggattgtgctgctgccatatgctaaagcggggagaaggcggccaggcacagtggctcacgcctgtaatccaagcactttgggaggccaaggcaggtggatcacaaggtcaggagttcgagaccagcctggccaagatggtgaaactccatctctactaaaaatacaaaaattagctgggcacggtggcaggcgcctgtagtcccagctactcgggaggctgtggcaggaaaattgctcgaacctgggaggcagagcttgcagtgagctgagatcacgccactgtcatccagcctgggtgacagagactccgtctcaaaaaaaaaaaaaaaaaaaaacggagaaagctgcttctcctcggacagggcctgcggagcaggcagaaagctgagggtagtgagtacaaagaaagggaatagtagctaactcactgaagttgggattgctcatgcagagacagctgagatttccaataattatcactttccttttttaatcaaaaagtatcattatctggaatcccttttactttctgtattctctgtttttccacactgctaaaaacacttttccttctgcctgcattaaccacaagtaatcagtctggtggctggggctggggaggcagcaaatggccatttctgtaatatccctagagcagtcacatgggcagggtgtgcctaaccagagaatggagttgttcagcttgcattcctacctggaaataaagtgctctccttattctcctcctgcaggtcggtgagctggtaaaggttacgaagattaatgtgagtggtcagtgggaaggggagtgtaatggcaaacgaggtcacttcccattcacacatgtccgtctgctggatcaacagaatcccgatgaggacttcagctgagtatagttcaacagttttgctgacagatgggaacaatcttttttttttttttccaactgccatctatacaattttcttacagatgtcaaaagcagtctagtttatataagcattctgttacctgtgatattttttagactgaactgctccattcctagtcttaattaccatattcagggtacgaactggagggcttgtgtgttagcttctgaattggcaattggaggcggtagtggtcgtgcctgtgtgtatcagaagggataggtatcttgcctcctttctctcaggcagtgcaaatcaccctgtggaaaaccgatggacaggaaggagtgttacacactgcttaccctgatttattcagtggttttgttttcattctggaaccatactatcaaatggcgacagactgttccgttccacccccgtgaagtaatcatgcaccgtgtgaatagtatcaagcaggattgctttcattgtatggagcatgaccagcgtgtgactcattctgacatttcagatcctaagaattctaagaacactactagaagcatttgttccctcctagtcaatgcttcatactttttcttgggattcttttagcccttgacattcttgtcccccaaacctgtaagtaggtgaattcctaagataagtgtgtattttcattccaggtgaaaagcaggatgtaccgagcactttattcagtgcatagctttaagccagtgttggattcactaagtggacagccagtctcccagctctctgccttccccaaaagggtcgtagtaggtcacccttctacagcagctaactagagtcctaactaatgggatccagcagggccatttctccagagggccagtatcctattaggagactcttggaattcttaggttctactcaagagtggaaggaccaatcacctctgatattctgtggaaggttttggggtcaaattctgccctctgcattctgtgcaacttgtataaaagtcaagttagtattacatgaatttggggtagggttagtgctttgaaaaaatgttgaaccggctgggcgcggtggctcacgtctgtaatcccagcactttgggaggccgaggcgggtggatcatgaggtcaggagttcgagaccagcctggccaacatagtgaaaccccatctctgctaaagatataaaaaattagcccggcgtggtggtgcacgcctgtaatcccagctactcgggaggctgaggcaggagaattgcttcaacctgggaggtggaggctgcagtgagccgagatcgcaccactgcgttccagcctgagcgacagggcaagactcagtctcaaaaaaaaaaaaaaggaaaaaaaaaagaaaaaaaaatgttgaaccaattgtgaattacttatgtattattcatttctcatggggagagtaatgctgttgaagaacattacattgtaaactgccttcatttttggctctttgtttatgttcaggtttagtttacaaacccatttaagtatggaatgatttatatggggtcaggtgctccacaaaatagacctatgagaccaaaaatgacctaggctatttagacgacagcatgaaacttccacgttagttctcagtctataaaggcacttaccggtctctggtgtggtatgaccaatagaaacaccttatagtttgctttggacctcattttggaaaaataatctgcctttctaattgttctgcataggttaaaatgataaatttacattctttgaacctataccagattgtggtgtccgagtgaccggcacactgtctgacacacagtcagtgtgcacgtatttgtctgagtgaatgaggagacctgagaaaccggtgacgtggcacagggaagccagctggcccaggattccgtacatggccgcaagcagactaacgcgttgacgctaatttaatgtattttacctcacactaaggtcatgcttgataaagacgttaaactcaacttgtaaaatggtagcccagtgctatgcacagagtgggtgctcattagtgttgaatgaacacatttgtaatactacatgtaattccatctgactgctttgttaaattttcagttagaacgtagatactgtaaagtccacacacacattaaatcttgttttcctgaaagtatggcatcaaaaatacttgtagaaaaaccttgtcacaactgatttgaatgttcctattttcttttcctttgactttgatattggcttgtaatgtctcttttcatcatatgtaatatcagtggaacaggcagcgctactcaagtcctaaggattcctcagtgatcagtgatccagggccgttcatgaaccactgggctggatttgactgttgagtgtggcagttaatgcccctcaagaaatcaaaggatgtcttataagtgtcttccaaaaaaaagcaaatgctgaaatcctattggcaaagtaaactgaaattggctgctatattttatataatcatttctgcaaatcccattttttgaatactaatatttgacatggttaattcttattaatttgttggaattgtttattgttaataatgcaaatagataatttttaattatccacaagtaacatttcactgttaatggtttgaaataggtgataagcaaaccaatttgaaataaaatataaacatgtgccattgtattataacactatacactttcttgacagttaaatttaaaaaaaaattttttttggtagcatgtattgtatatgtttatagtatatgtagtaaataaaaatatggccaaatgtttggcttggtgatcttttgcaaaaaa

SEQ ID NO: 30 - DNA, 547089 bp, synthetic construct
  source 1..547089: mol_type = other DNA
ctccccatcctgtcgcggctcgaaaggaatggaaaatggcggcctagacgcggagtttcctgcccgacccgcggcggctccggcggcgccatgacgcgctgggtgcccaccaagcgcgaggagaagtacggcgtgggtgagcagcgccgccgccgccgcgcctctcgccccaagcccaggctccggcggggcgggtgtgccgggcgcctgttgccgccgccccgagcggccgccgggccggggagaggcgcttccgcccgcgcccgcgccgccgccccgctcgcaatgcccggcgaccccggccgccccgcgcccccggcggcgtcagctccagccccggggatgcgggtcgggaacacgagggggtggggtgggaatgggggcgggcgcgtccctccctagggtgtcccctccgacgcccgctcctctggacctctgccgtggagccccccgggctacccccaactccccggccccggccgctgctatctgcgcggctgggcccgtcagggaagcccaggggtcactgtctcgcggcggcttctgcttcttggatgaacttgcgtcccgcgtccgggctctgggtgggcgggctcaggtcggcgcggtcccagcggataattccgccctttcccggcggggaggagggggcgcgacctgggtggccagcgccccttgcccctcggcggtctcgctggggaccgtgtgggaccttggagagaaggcgagcggccgagcgccccagtggccccaggcctggagacccttccgggagagcgggggcctgtttttgctccgcggctctttgtcgcttccgaggggggatggaaggagtcgggttgcaagtttacatttcggacccgagtgcgcattcctgagagggaggctttcccttgcggctgaatagacgggcccgtccgcgtgggacccgcatccttgcgccccggggacccgcagccggtcgccgaggcctgcggacgcccacctcttcgtgatctgcgcgcctggtgtcgggactgggccgtggctactctcctgctctcccgggtccgggatcttcccagttggttttcgggcttgctattccccgtcccaccatccacagacatccttgaccgcctgcctcatccaggccactcgacccgactgggaagacctttggtggtctcgcctcccacagcccaggctgtgtcctccaagggcaccgtctcagcagcagccccgcgcccattctgtgcctggcccgtgctggacctgcccgaccctctgctggtgtggttcgaatcctggctctctgacttttgggaagcgccctggcagcccttgtccccggagcgctctcctttctgtgaacagttgcttctctctgctgtcaatgacttacagtatgccctgaccacggagccagctggacagtggtcacggggacagtcctgggacagccctgggtcctaccgggcctgcacttagcttgttccacatgctgggaggcatagggggcctccttgcttcaggaccattatgactgagcttcctccccatctccccattttgcagatgaggaaactgaggcccagacacattcacaaaagtgcaggagagctcatctgactgcagactcagtgtgtaacctgcaccctgtgcaccacctaatggattcagtctggggcacttggcacgggccttcagtctgcatcagaggcgagaggttcggggtggatattccacctgagaatgcttgggttgtggcgacagtgggggtccctgcgggggtagtgtgtagaggagagagctgaggactgactcccagggaacctagcaccagcacacgcagagagagaggaagaggtggataggcaggagaggcaggaggctggcagaggagcaggcatcccatagccctggccctgctgaggaagcaacttaggtgcccatggccagggtgcagtagtggccattgggggtgtagtgggggccatcggggtgcagtgggggccatcactgctcccattctacagaggcaaggaagaggtggattgcttgcctgaggtcacatcaccagtaagtggtgcctcctgggtgtgaagtgtggccgccctgggttcagctgccacagtgtcctgtgcttgcctgcagatggggagggcttctctttgggacgccacattttaagagaccttgttacccttcgtctgcccccagagagacctggatggtgtcagttaggatcctatagtgtagctggatggtctggagaagactgaaaagaatgttcgtagatgggagaacggggtctccttgctggggaggaggctgagggccagaacagggcggtgcgcttgagtctcacaccttccagaagcttcaccagcgctcatggtggtgacttctaacatcacacctcttgctaatactttggttttaagaaaactccatgtttgattattaagaaaaaataaatttaaaaaagttaaaaaaagaaaaaatagaaaactgttggaaaattttaaaaggcgaaaagtatctgggatggttttgccaggaaatgctaggaaagatgtgaagggctgaaggtagagaagagagtggctgctgtgcttcctctcactgggtgcagatgacagcttgctgggtagacagtaatgagacagcaccactccatcggcatccagaggcactttaaccagagtcccccatcagggagggtgggaggggagctgagcatgagcgcaatggggccatcccaggctccccacttgtctgcaagtgtgcagtgggaggattttagtggttctcacgaaggatgctgactgggaaggatgtaggtgctgggatgtagggatttattgccagtaggtgattggctgtttccacctaagggaaaattactggaggacccctccaccatccttaccaactccagcatttttcggagcttaacaacagggctgtgtttccctggaggcgctctggtggctctgtgggtggaccacacttccactctggccacttggcccatgaacgaatcacgaggggtaagaaaatgataaaactccatctcatttggaaacatgaatcacagcttattgtttgcaagtacttggaatctgttagaagcattgtttgtaaatgagatacttcagttgtatatttattttgtaaaattgggaaaggagtaaacagctgatctggggttccttctgcaaaggcaggaaatgctggttcctcccaattcattccactgggggctgcctgtgaaatttaccagcccgcgtttcccccttggttttgagttggtgggtcatgtttacgggcctggcatattaacaggcataaaccttgactcagctgtcacactggccagatgatcttttctctcacagcccagtaggcagttttatgtcccgacgtcaataaaattatgttgccatggatcctgttcctaagattaggtgaaaagatgcagtatgttctagaatcacacgtgaggaccatgtgctcactcactcacatctcaacaatggtgttgaaggcagaataatggtccccaaaaaggtccacgccctaatccccagactctgtgaattcaatatgttacatggcaaaagggacttggcagatgtgattcaggttacttggaattcgtagatgggagattattcaggaccatccacgtgggcacagagaactttggctgtcaaagttgtgaaacaggcagtcagaagatcctatgtttggaagcacagttgctggccctgagatgtaggggctcacttgcaaggaccagagagaggcctcagggagctacgggaggcccctagctaatgatcggcagttacaaagaattggatcctgccaacaccctgaatgagcttggaaacagatttcctccccagggcctcctgctaagagcccagccagccaacaccttgattttgagaccctgagctgctgggcgtgtggcctgtggaactgagataatacatttgtgtggttttaagctggctgggttgtgggaatttgttacggcagcagtggaaaactaatacagatgatgggagagaagcttgcagggtgaggctctcttgcacccttgagatctgttactaagttcattgaaggtagtgaacccaagtgtgctcttcactttggccacttccaagtgcagctctcaaatgggatggggcattggcactgctcttactcataatgggacccttgagcaaattactcatactttcttagccttggttttctcatctgtgaagtggaaccaagcctgcttgctgccgagtcgtgaggactcgctgagatgatgttggcagagaatttagccctgcgtttaagatatgccaagtactcaacgaagcgttgcttttgttaactttttatttaataaagcataaagtttagaaacatagtgacaagtgacttctgtgtgcggttaacgggttgctggaaaaatgcctttcttcaaaagttggtttcttgatagtgtgttttgcttcctaattggggtagaagtcacatttgctcagtgtgaggagcctgacttgcgtgccttcacattagctctaagcaatgataattgctaggaatagtgtgatatccaaataaatttgggagcgtgggagttgatgagagatctcttttgttatctagagtagcaagcaagctgctactttggggaagaaaaattagatttgatcataagtaaatagaaatgcaggcattttcattcactggaattgcagcaaaaccaaatcagggcatattatatttctacaaacctgattttactttggaaacataagaaatttaaatttatttctatgccattgtttgcctaggataccagacatctgatcaggattgtcttagtgtgtgtcaatagttctgtctctttatcacctctgtggatgcaggtagtgaaatggggaggaagaaataggccacgtggtgtcctttgctgggtgtggcgctgacgccccagggccatcgctgtagcaagcgcacacttgtacgctgttcccaccctccttccctccctcccttttcccttctttcttttcttcctctctgtactttgtattttcagatgattgcattaaactttgtattttcagataattatagccaaatgcgggtgtaaaatataattcagggagatcatgagtagccattactagtttcacctaaggttacgtcttgtaaagctgtagtacagcatcacgactgggatattgacatcgatagtcaaggtacagaacatttccagcaccacaagcaccacgcctacctccctccacgcctttctcccctcaaatcctggccaccctttgcctgttctgtgtttttataatattgtcctttaaagagtgttccgttagtgaaattgcataggaggtaagctttcgggattggcttttttcactcagtatctctctctggatattcatccgggtgttgcttcttttctttgctgagtatcatttcatggtctggatatgccccagattaactgttcacctgtcgaaggacatctgagtttggctgtgacaaatacagctgctgtcaacaagcacatacaggttttagtgtgaacctaagtcttcattttctgggataaatgcccaggagtgcagaggctgagtcgtctggtagttggatgtttagctttttaagaaactgccaaactttcctggagtaactgtgccagttcacattctcaccagcagtgtatatgtgattgtagatttctcggaatccttgccatcatttgtcaccgtccttattgcttgtgtaggtgtgtagttgtctgtcattgtggttggagtttgcatttgccttggtttcatttgggagccagcgtgcagctccctgtgctgctgcggtacaggagaaggcagcccacccagggggtgctggtgggagcgctgtatgagcgggtccactgagctgtgaaattgtccagtgtattcagggaaggactttgatccagtttgaagagacatcatggagtggaaggctgaccgggcacatgcaccagtgtggagaccacggttaacaccaggtggtcgcttgtcaagatgcggttgtcaagatgttcacttttcaaacccttcagtgcatccggaaggccttcagggaggaaatgaggaggcgcccgaggaggggtcagagtttgagttttagccctgacaaggccactgttcatgcatatgacccagggtgagtgtttgaacctcttccagcctggtttctgcgtttttaagcagcgatgttctggatggtactgtgggctttgcttcactgaggttgggctgatgggagttgacaggaactaattaatgtatcttaaggcagtttggaaacattgttatgcaaatggattgcatttgccatcagccactgttcctcaatttgcttttattgatatgatgggaagtgctttggagctgacgttgaaatcacagtgtggaatttgtgtgttagttgactggagctaccataacaaaggaccacaagacagggtggcttaaccaacaggactgtgtttcttcacaattctgtaatgccggagtcaaggtgttttggtggttggtttcttctgagacctctctccttgggttacagacagctgtcttcaccctgtcttcatagggtcttccttcggtgtgtgtcagtgtcctcatttcctcttcttacaaggccactatggccagcctcggtggctcacacctgtaatcccagcattttgggaggctgaggtgggcgggtcacctgaggtcaggggttagagaccagcctggccaatatggtgaaaccccatctctagtaaaaatacaaaaaattaacctggtatggtggcgggcgcctgtaatcccagctactggggaggctgaggcaggagaatcactggaacctcggaggcggaggttgcagtgagccaagattgcgccattgtacttcagcctgggcaacaagagcaaaactccatctcaaaaaaaaaaaagagaccgggcgcggtggctcacgcctgtaatcctagcactttgggaggccaaggcggggagatcacgaggtcagtagatcgagaccctcccggctaacacggtgaaaccctgtctctactaaaaatacaaaaaactagccgggcgtggtggcgggcgcctgtggtcccagctactcgggaggctgaggcaggagaatggcgtgaacccgggaggcggagcttgcagtgagccgagatcgcgccaccgtactccagcctgggtgacagagtgagactccatctcggaaaaaaaaaaaaaaaaagaaagaaaggacactagtcatgctggataagggcctaccctaccgtaaagaccacactttgacttagtcacctctttaaattccctgcctccaaatacagtcacacatccaggatgctgaatttctgaggttagaacactgacatatggatttggagggacacagtgtagcccataacagtatgattttgataacataagacttttcatctacagtttccctctgtctttagtggcctttgaatttttttttttttttcctgcaagcccatgggtccctggtgctactggactcgagggaggtaaggagctttctaatgggactccaatttgtttctgttcagatctggaaattccttgtaatcaaattagtgacagaacaatgcaatcaggtagtttgagatccaaacaggaacttcagagcagttctttaagtgtgatcattctcctgtgagtgtggctcagtctctgagctcaacctacctgggcttaagctgcatttagcattaggatattcacacatcctgcttggacttaattccagtttcttaccatttatgtttttgtagcatgagtagggcagcctcatattggctctggaatcccagttggacagtgatggcaaaacccgggctttggtgctggtgtcacacacttggtgacccagggctgtcccacacaactccagggggcactgttcttctccacagcccacgaggctggcttctgtcctccactcgcaccttgcgtggccctccgtggccttgggccgtcagaaaagcgctttaatatcaggagctcatggggcaagggagggggcttggctcgtgacaaataaatgacaccgggcttcttgatgatgacttacaagctcagttttggcctgccactctgcagttatccacatgcccacatgcacgtgggaaactgagtatccacgcaggcactccctgtcttcaaaaggcagatggtttcaccccagacagatgtctgtcagttcgttgaattttcatttgggtgccttgaggagaaaaagatgctttctcttggcatatagtgtgtgctgtcaaaacagctcaggttaggggtcatagagatccgtctttgaatatcagcctggtgtcttattaggcatgtcaccttgggggttatttaccttaagcctgagtttctcctttgtaaaactggtgataacaccaacctctttgggcccttctgaggagaaagagataacctagcccaaaccgggcccatggtctgtgcttgataatgttagtttctttcatcctttattgattgctttgtaagtagaaggctgtgttgcttgggactgaatctctagcttaattcaggctctccccagccctgctgcatgggccccattgcttctgtagcccctgcctgttgcaaagtgctggtcagaattttaatgttagctctgaggttagatcagggactgtagttcttattgattgctggggggtcctgaagggacaggatgaaggcagatctctacatctctcatcagaaatgttaccttgagtctttatctagatgcagttgctgtttagacctatgatttgttgctgcatctcctgaggagtgtgatgcaagatttttatgccatcctgagtgatttgtttcagttttaaattttattttatttatttatttttatagacaggctcttggtctactggccagaccagagtgcagtgatgcgatcatagctcactgcagccttgaactcccaggctcaagtgatcctccaaccctggccttctgagtagctgggactacaggtctagctaattaaaaaaaacttttttaaggagattgggagagggtcttgttatgttgccctggtctcaaactcttgaccaaagtgcagggattagagatgtgagccaccacacccaggggagtgatttaacttaattggttacactaggtaaacttaggtgtatttatgtaacagtcatgatttcctttctgactgttagctagctgctgtaacaaacagccccaacattttgctggcttcatacaatacaagtttgtttttcatttgtgtcaaagtgggcggtggggagggtgagcaggggctctgctctgcccagccattcagagtctctggctcctttgaccctgccagtctgccctccactgcccttccccattcaacctgtagatggggaaagaaagagatgaggatggtgcatagattttctttctggcctggtctgggggtggtgcccatcccttctgctcacattttctcaccgtgacctgagtctctggtcagacctgcagcaagtggggtgggaaatgtaatctgactgtgtgcctcgcaggaagaggagaatgtggatttggtggtctcctccacgtgttcctattgatgcttattttccattaccaggaagaatgttagtctggactcttcagcttcattggcgttgagcatagaggttgtacatcctcaggactttcaccctgaaagtcacttggcagaacagatgttcatgtccctataaagacggaagtgatgccaaggacagacgccgcctttttccttggggtgtattttgctacttatgtcctatagatttcaggatattcttcagggtataccaagcccgagagcagtgctgctttctcaatgtgtctttttcttttttgggggcgggggggggatggagtcttgctctgttgcccaggctggagtgcaggggcacaatcttggcccactgcaacctccgcctcctggattcaagcagttttcctgcctcagcctcccaagtagctgggattacaggtgtgcaccaccgcatctggtaattttttgtatttttagtagtaacacggggtttagttactaacacgggttagtaacacggggtttcactgtgttagccaggatggtctcgatctcctgacctcgtgatctgcccaccttggcctcccaaagtgctgggattacaggcgtgagccaccgtgcctggcctcagtgtgtcctgtccttttcatatctgtctggctgttcctgttcccaccatccaaaaacacatgcacaccccaggcccctttcctgtgctgtttaattcttttggcctcagaaggctgtgtactaaagcttgctaatgagaaccgtgtctttgtttttaagtgttttttgtctttatagaatggaatctctatattctgaaataactcttgtctatgagtatgtatgcaatgagaaaggctataaagttaaatcaaggagagcaacagtgacttaaaagttaggcgttgggacactatggtgtggagtttagagcactggattgacagcctgaataatagggtctggtattcctgggtacagcacttaactgctgccacctctgccctccctgagccccaggccccttacctggagttagggcatatcctagcacatctgtgcatctcagctctgcccaggggagagagcaggaccgtgtgtgtggaagagctttgagaagagaaagtactacttagtgttgggttattcatgttaaactattatacagtcaatattaacttcttatagagaaaatatatgatttctggtgattgttttaaattggaaaaggacagtgtggcattgtgagtttcactttcctcaaagttttatgatttttattttacttactagtagacaagttttctagtaattgattatgttgtgagtagatgaacatcttgcataagcagctagcctgggctgctgtgtaacctatgtatagagacgaatggtgatgaagcctgtatgtttcagcctcggttaggaaaccttctgtcctaagccacagaaaagttaaagaagactctgcctcgaaataactcatttcttccctcccttctccccttcttccctcattccttctgtcctttcttcctcccctccttcctttcctccttcctttcctcccctccttccttctacccctcctttccttccttcccttctttcttccttccttcctgtttgcttgccagccctgttcttagacattggtatctggagctgccctcatggggtttatagtctgatacagccaactcttccatatctgaaactctcgaggccagtggtgtttcagaattccagtttgtcacagtgcagagagacaggtgggagctgtgtgaggccagcggtgtttcagaattccagtttgtcacagtgcagagagacaggtgggagctgtgcgaggccagcggtgtttcagaattccagtttgtcacagtgcagagagacaggtgggagctgtgcgaggccagcggtgtttcagaattccagtttgtcacagtgcagagagacaggtgggagctgtgcttgtggctcctgtgccagacaccccgagcagctctgggcaacaccctggagtcgagcatattgattctgctgccatgagcgtgtgaacattcacagcacgagggaagccatccgtaattagctcctctccgctcaggttagacttttgcagttaaatgaattacagaaatctctttgggtttgggaactttgtgggtatttcgggcttgtgggtaatgaactgtcgatgttgtattttttcacagctcaaccaacatattcaggttttgtcttctcagggcctgtcattcattctggttctctgatcagatttcctcagactgtgggtgcctgcagccagcccggaagccctttaaaatgcccttcgtggccatcctggcctcattcccagatccactcctgtccagctgggtgcctggctggtccccggtcacagtctgcaattcccactcccctgcctcagcttcacagggtctgtggctgatccgagtcaggccctgggcactgctggcctcatcacattggcctccggaccccttctggaagagacttatccctttgttccaccccgggctgtggggacaagattttgcgagagctgagggcccagtgagaatggtcttgagtccttagggcctgggagccctaggtggaagtgggaaggaggaggaggagagtggggaggagatgtgaggactaagcgcacccagggccagtttaagaggtcagggtcgaggacattagaggcctgtctcccccaggcgcataaagctgtgagttttccttcttcagttccttaggcagaacccctaaagcagattctggggtgatggaactctgggtatgagttcttgttagccaggcatagttaggagcttgggcctgcatctggacgagagagactcagctgtgcccattgagagcttgtgctgcctgcaaagtgacctgcctgaggctcattgcctggtccctgtgaatattaagtggcttcaacacaaagaagggacttccaggggaggctgcccgggattgccagtgcagtggggctccgctgatgctcaggatcaccagcgtgcagcggggactccactgatgcctgggattgattgccagcatgcagcggggactccactgatgcctgggattgattgccagcatgcagcgggggctccgctgatgcccggtatccaccagcgtgcagcgggggctctgctgatgcctgggcttgcatgccgctgccgctgcctactggtgcgtggcggtagccgcctgtgcccagctggtgtgcttgtccaaggtgatgacggtactttttattgcacagagttgctggagagttgaatgacctgggtcatgtcagcacagtttctcagtccctgcactgttgacattctgggcaggataatttttcaccctggggagctgtcctgtaccttgctggatacttagcagggcctgcccagtagatcccggtagcaggatccccctccagctctgtatgttcttcagatgatttggggatatcactggtattttaataagttctagaatttcccccattgacattgccaggatgtcaagccaggatgtctcagccattgccaactgtcccgggggtaagtggggcgggatggcctaactcatggtaaacactcaacagctgcttactgttactaatgatactgtgttattagcagcaaagtcagcgaagtcacttctgtatatttgggaagaaaagctagaaaccccaacgacttggtctggcagggtgtgcaggtgggcacggaggattcggacaggtgggcacggaggatttggaggaggagaaagtcaaggtgcagatgggcacagaggatttggaggaggagaaagccgagagggagtgtgggggcccttcggccaagcttcttggctgtctaaagatcattaggagctggctgtgtttcattctccttctgagagacaaacatgagtttctcttgaggccaggagtgatgtgcagatgaacacgaattgtgtggctcatcccaacatgtcctttaagaaaccccatgcaggctgcttagagaccttcctaaacgcaggaactcaagcatttgcttcttggagttttatttgctggaataaaggcacttatcaacctcttttttatttttcgaaaataataacttattttctttaacataattgacttcaccagaggcaaataccgatttagcaggaaggaaatgtgattattttcctttctaattgctgtgcttctattaacttcacaagatttgttttcaagtcctcctaacgtcataagtgttttcctgacaatttttcaaaggcaggaatcgtcctgttcctccaggcaccgtggccaagtggccagatttcttcacattattcttgggggttgttgctttgagaatcagcccagtgaggccaaggggaaggggaggtgggggtgtgtgcaggaggcctgagacttaggtgaccccgatgacggtctgtgctatttccatactcaggctctgtggccgtcagcccgttgctctgagggacaaaagctttcttatcccaacccaggctggatgaccccccgatcccgcgttgctctctgcagttctgcgacatgcttcccctccagtccccctgggggcaggtggtggctccgtgtcccctgctagacggagggccctcgagggtgaggccttaatcctgttgctttctctcttcccagcacctgctgtggtccctggcacaccttgccgtacattgaatgaaggcaaagggagagatttcatcatagcaaaatgtcatgaactgcctggagaaccatgagttttctgttggtggggagttacgtcttggagggggcaccacttccaggactaaggcagtgtcggctcagctcgagaatgcagtgggtgacggggtcagcagccctaaaactccctccaccccggctgtgggaagcacccactgggggctccatcccgatgggcttcctgagctaaaatgggtgctttgtccatgctggataaatatgtggcgatgttggtgggttgggcaagtcagttacacgactctgtatgttcttcagatgatttggggatatcactgttattttaataagttctagaatttcccccattgacattgctacaaggcaattaaattaaattaaagttccttcttaataaaatgttccagtaaaacactttcctagtccccttgttgatacgtttgtctgcagtgactggattagctggcgggagaatagaagaaaagtggattttgaagggagattgtgcttgagtcacgcttccagctcctagtcattgtgggaccccagtggggctccccagagctttcgggtcttgatcatctgtaaaatgagggtcctgccaccagtcttttctgctcccaaatgcagtaatgaaaagccaatgaaatcaaagtatataatatatatgctaaagtactttgtaattataaagcattaaacagctaaaaggaataataaattctgttcagagcacagattggcaagctttttctgcagagatctagaaaataaatactttaggttttgcaggccaagaggcaaaatggaggatactatgttaagacattaaacctagaactaccatctgacccagtgattcttctcttaggtgtgcacccagaagaagtagaaacagttcacataggctggtccgagtgcagtggtgtttacaactagctgatcacaaccagttactgatgtcattgttccttctccactcccactgcttcacttgcctttacaaaaagttcaggccgggcacggtggctcacacctgtaatcccagcacgttgggaggccgaggcgggcagatcacctgaggtcaggagtttgagactagcctgggcaacatggtgaaaccccgtctctactaaaaatacaaaaacaattagttgggcgtggtggttcgcacctgtaataccagctactggggaggctgaggcaggagaatcacttgaatctgggaggcagaggttgcagtgagccgaggtcgcaccattgcactccagtctgagcagaagagtaagactctatctcaaaaaaaaaaaaaaaaaaaagttcaaacaagtagttatttacaattgttcgtagcagcattagtcacaatacttaaaaggtggaaacaattcaaatgtccatcattggatgaatggataaacaaaacatggtatgtccctataatggaatattattcagccatgaaaaggaatgaaacaccgatcatgctacagcatgggtgaaccttgaaaacatgctaagggcaagaagccagtcacagagggacatacatgattctattaataggaaatgtgattctgtttatatgaaatgtccagaataggcaaatctgtaggcacagaaagcagattagtggttgcccgggactaggggagggcgtgatggggagtggcctcttagtgggagtgtcagtctgtttgcattactataaaggaatacttgaggacgggtgagagagagagagacagagatttgtttgtttgtttatttgagatggagtctcgctctgttccccaggctggagtgcagtggcgcgatctcaactcactgcagcctccacctcctgggttcaagcgattctcctgcctcagcctcccgagtagctgggactataggcatgcaccacctgcctggttaatttttgtatttttagtagagatggggttttgccatgtcggccaggctggtctcaaactcctgacctcaggtgatccacaaggctaggtaatttataagaaaagaggtataaggctggacacagtggttcatgcctgtggccccaaaaccttgggaggcctaggcaggctgatcctttgagcccagaagttggagaccagcctagacaacatgacaaaaccccatctctacagaaaatttaaaaattagccaggcgtggtggcacacacctgtagtcccagctattcaaaaggctgaggtgggaggattatgtccctggagcccaggaagtggaggttgcagagattgcatcactgcatttcagcctgggtgacagagtacgaccctgtatcaaaaaaaaaaaaaaaaaaaaaaaaaggaaagagttataattggctcatgtttctgtaagctgtacaggagtcatggtgctggcatctgcttctggagaggcatccggaaacttccaatcatggcagaaggggaagggagagccaatgcatcacaggacaagagcaggagcaagagaggggaggagctgccacactctagtccagtctagaccacacactggtctagagtcttagaatcttttagttttagaataatgaccattatttttgtaacaaccagtgtctcgggaactcactgagtaagaacttggtcctcaccaagaggatggtgcgaagccattccggagggaggcgccatgatccaaatccctcccacaaggcccatcttcaacattggggatcacatttccacaagagatttggaggggacagacatccaaatggtatcagtgactttggggtttccttatgcagtgatgaaaatacttaagaactagacagaggtggtggttgcacaacattaggaatgtactaaatattacacactactaaattgtatactttaaaatggttaattttctgttatgttagttttacctcctttaaaaaaaaagatgaggaccgggtacggtggctcacgcctataattccagcactttggaaggctgaggtgggcggagcacctgaggttgggagtttgagaccagcctgaccaacatggagaaaccccatctctactaaaaatacaaattagctggatgtggcagtgcatgcttgtaatcccagctactcgggaggctgaggcaggagaattgcttcagcccgggaggcggaggttgcgttgagccgagattgtgccattgcactccagtctgggcaacaagaacgaaactccatctaaaaaaataaaatagaataaaagatgggaaccattcttagcttatgggcagtataaagctaagctgtgggccacatttggcccataggctgtagtttgctgacctctggtctagagtcttagaatcttttagttttagaataatgaccattatttttgtaataatattgtatgctagttattaaaagattgcaaactatattaaagttaaaaggatgtaaaaaacttaggcatggctgggtgtggtggctcatgcctgtaatcccagcactttgggaggccgaggtggatggatcacctgaggtgaggagtttgagaccagcctggccaacatggtgaaaccccataactactaaaaatacaaaaattagccgggtgtggtggcaggtgcctgtaatcccaggtactcgggaggctgaggcaggagaatcgcttgaacccgggaggcggaggttgcagtgagccgagatggcaccactgcactccagcctgggtgacagagcaagactctgtttcaaaacaacaacaaaaacaataaaaatcctaggcattctccaagcaatctgccacggagaaaggagcgccattctcggcatctctctccatgtgcgatggtccgtaccctccccctccccacttcatacacagaaacctaatcaccaaggtgatgggattaggatatggagcctttgggaggtgattaggtcatgagggctgagggtccttctaaaagaggccccggagagcttgttccttctaccctgtgaggacacagtgagaaggtgccttctatgagccaggaaacaggcccttgccagacaccaaatccacctgcccctcagtcttggactttcccagcctccacaactgtgggaaatgaatttccattgtttgtaagctgcctggtttatgatattttgatatggcagcccgaacagaggtagataccatgtgtagagagaaacaggcagagaaataggagagttgaagggtaccccaccctccttgatttctagttgaggaaatggaggctgtgagtgctggaactgagcggggggacttgagtgctggaactgagcagggggaactgaatgctggaactgagcagggggaactgaatgctggaactgagcagggggaactgagtgctggaactcagtagggggaggctgtgagtgctggaactcagtagggggaggctgtgagtgctggaactcagtagggggaggctgtgagtgctggaactcagtagtgggaggctgtgagtgctggaactcagtagggggaggctgtgagtgctggaactcagtagggggaggctgtgagtgctggaactcagtagcgggaggctgtgcatgctggaactcagtagggggaggctgtgagtgctggaactgtctctggggagccctgtctggagccttaaaaaaggcaaacggcccttgaaacggcagggtggggagagttgaccaaaaggttaaaaagcaatttaacagaaatccaactcttcaggattcttgcttcttccaccgtgttgcctccagaagaacagaaaatgaaatctcattttgcagttttcgtctgaccagcagttaccatggagggccaggtgtggtcaagggctctagaacgtttgtctgcacagtttccctctttgatctctgtgatttatagacaggcacttaaaggtgggattaatgtgtaaagagccttcagagtgaaggatctaagtccctggaaatgaaggattggatgaaagtgtttcttaaggacaaacttttaataattgtggcatacatactgtagcattagtacttccattgtacaaactcagtatttgacttacctgccaaagtctactgcttacctgcacataggtgcatcagctttgcagattctttttaaatgtgtcaacccacgtttttaaaaactggtttagaaaattctcactgggcttcccgcctctatcactgatctagtcatgattcatcttatggctgggaaagcatcactagcctggagaaactgaacggtggtgttgagtcttgttttcagtttttattagtatttcctgtttcatacagcccacctttctgggcaataagcctaacataccataggctgattttctaaaacacttttatttatgcacacacacatatacatgtagttagagctgggtgaagtcctgccagtaaccagacctgctttttcattttatccatcagatctcttggtgtcttctcttactactcagggtactcatgtgaacatttttgttttgttttgttttttgagacggagtctcgctctgtttccaggctgcagggcagtggcacgatctcagctcactgcaaactctgcctctcgggttcaagcaattatcttgcctcagcctgccaagtagctgggattacaggcgcccaccaccacgcccagctaatttttgtgtttttaatagagacgggatttcaccatgttggccaggatggtctcgatctcttgatctcgtgatccgcctgcctcggcctcccaaagtgctgggattacaggcgtgagccaccctggccggccttatgtgaacatgtctaaacacatacacacacattgcagagtctgtgtgtgtgtgtgtgtgtgtgtgtgtgtgtgtgtgtgtgtgtgtgcgcctaggtgcatctgcagaaataggtctacaactccaggctatagctggagaatctccaggatgggcttatgtcacagtagggtgtgatgtggggtgtgcctgctatgtgtgttgggtggggttggagtgggatgggttgagctggtaacactgagaatctttggccctgagctccataaactgaacccgtgagggaggtgcctagctgggtgcaaactccttaattcctgtttgactttggcccagttagttaaccgctctgagcctcagtttgcacatctgtagggtggggataaatagtacttgcttcctgtgactggagaaaagagtgatgtgataggggtaaaatgttcagcatcgtgcccgacacctggtagccacctgctacatgggagtaccatcggggcaccatgtaagcctgaaaattgatccggtgacagagccaccgaagtgttttgtcttctgttttcttttctttctttcttttttttttttaaatactagagagctgttaagaatcatcagatttccacataaaacacttgatgtttgctctcagctcgaaaataggtacaaacgtcagtgtgaattgagatttccaggaaaagtagacaaaagaaaaaaaagaactttgaacaacattttcccgtaagtattttcatatatttacatgtcaacttaagggaaaacacaactacttatcttgcagttttacgactgtatcacttaataaacattctatgccagaggaggttatgggttgagtcccctgaaaagacaggttgaagtcctaacccttagtgcctcagagtgtgaccttacttggaaatggggtcatcacagatgtaattcgttaagatgtggtcatactggattaaggtgggcgtttaatccaatatgcctggtgtccttgttaagaagaggagggacacgtgagaactcagccaagtgaggatggaggcagaagtgggcgttacacggccgcaagccaaggagtgtccagcagcccgtagggctccctggagctggaagaggcaaggaggaagtctcccccagagggtttggagggagcatggccctgtaggcaccttaatttctgacatctggcctctgaaactgtgagaaaataaatatctgttattagaagccaccaagctttggtactttgtgtggcagccccgggatactgacacagtcgtagaaatgcagttgagacacaggggaaaaagtatttctgttagtgggcaattgagaaggagagacttgtaggcttttagtgctcacttcagaccattggcgccctgcatcttgtcttatctccagtcattgaggaaataaggctcagaacaattgtgctccggtgtattttgcgtcgtctttttagaagaaaactgcctagagagtgcggtggtgactaccacgccaggtgtgtgaccatgatagcagatttccgtctctgatctgctttttctttcagtttggatttgatgtgaatgttgttgaccagaactggaggtgagcaggagagaattaactgccttccgtccagagggactaggcattgaaatgtgcattccagattcccctggagcagtgaactttggagttagaggccgagctgatgatctcttcctttctttccaaagaggatgtccgtgagttactgtctcattcttttttttttgagacagggtctcactctgtcgctcaggctggagtgcagtggccatctcggctcactgcaacctccgcctcccgggttcaagcgattctcctgcctcagcctcccgagtagctagaataacaggtgcccatcaccatgcccagccaatttttgtatttttagtagagacggggtttcatcttgttggtcgtgctggcctcgaactcctgacctcaggtgatccgcccacctcggcctcccaaagtgctgggattataggtgtgagccaccgcgcccggcctgtcttcattctttcacgtgttcattcagtagacgcgtagtcagagctgcccacgtggcgacaccctccctaggcgttaaggactcagtgaagaacaacaccagcttggtgtccacccttgggttgctgtggctgcctagcaggaaggacttggggccaggcagttaccatgctcggcggagaggtgagtggtctcagggaagacacctgccgtgcaggtgaggggcacctacccaggtgccacctggtctgcgaacgccagtgaggggtgtattgtttctggactctgacagacatactgaagatactcaggggaagaggggctaagtgttctcagcagtgggaacggcacatcctagcctcgtgtcgctcgttggagaagctgaaaaaatgaaacatgcacagagtgaaggcgttcagcagagtgagaataagccgtgaatgggagaaaggactcggagcctcccaggtcgaataagggcctggaggaacagcatgagctcgtgggacccatctccctgggctcttgctgtgggccagggttcagcctgatgagctgctgagagccgtgtccacggctggtgtccatgcgtcccaggccctgcccccagggacttcagtggagcccgcagcctgactcgtaaacttgctcagtattcttaagcctccagcttaagatgtggtcatgctagattagggtgggcctttaatccaggatgcctggtgtccttgttaagaagaggagggacacatgagaactcagctgtgtcctgagagctgtgtcctcggctggtgtccatgtgtctcaggccctgcccccaagggcctcagtggagcctgcagtctgacttgtgaacttgcccagtattcttaagcctccagcttaaggtgtggtcatactgggttagggtgggcctttaatccaatatgcgtgatgtccttgttaagaagaggagggacgcatgagaactcagccatgtgaggatggaggcagaagtgggtgttacacgaccacaagccaaggagtggaggctctggggcaatttaccacccaatttaccagaaactaaagagaaatgggcttcctttcttcctctcctctatttctaagcgttattttgtacaatcaccccatagccactgttggcgtgagccaggaggcttgatctgttggtctagactggtattacagttaagtatttaatcaggtcactttcagaggcttggcgggaggcctttaatctcttgggcattttcacatgtctcatttgacgagggcctctctgtctagaaagactgtaggctggaggcagagcttccagccgtgtttagatccatcaggtacaggtggaattccatggaagcttatttgcattggaattgattctgcaatccaggatcagagcctcttatgggctacattccattgacctggaatcccagagggttaagagatggtttgcagttggactgatctggggatgaaccattttccccagattgctggttgtaatttttggaatttacctcaccctctatgctttggtgtgctcacctgtaaactggggagaaaagcaattgctaccccttagtgttttcatgaggattcagtgttgacacccaggagatattatcatttattggactttgctccctaatctagtagagaagtggaccacagggtgacagttaggagcttcagagtgtttgctgttggccagagaaggggcctggggctcagtactcatggtggagtctctgggaagcttcaccaaggaggctcctggcgagccttggaggacgccgaggatgtggagggaagcagagggagagcggcagactgggaggagcctgagggaggcgctacctgggctccagcttcagatgcatgggagagaggttgggtgagggccaggagtgctcaggcccgtttaacaggtaggacttttgtcctgagaacctcaggatggagggaccattgcggggaggggcaggggaagcaggcgggagggcacttcagggcacagttgtttaagttcatgaatcagttgcatgatttaaaaacaaaataatgaaggtgagagtcacataacatgtagctaaccgttaacaagaacaattcagtggcatttagaaggtcacagtgttgtgcagccaccgccactgcgtagtccaagacatttctatcactccaaaggaaagccatgtacccatttagcagtttcttcttttttttcctcttcccccagctcctggccaccaccaaactgtgttctgtgtctctggatttatctgtcctggttagttcataaaaatgcagatcccacgtgtgtggtccttgtgtctgccttcgtccatttagcgtgcttatccacactgtggcatggattgctgcttcattcctttctgtggtggaatagcattctgctgtatgagtagaccacgatttgtttgtccgttccccttgtgatggacttgtgggttctttccaccttttggctcttgtgactggtgctgctgggaacattcatgtccacatgtgtgtttgagcaggtgctcagttctcttgggtatggacctcggagtggaattgcggggtcacgtggcacttctgtgtttcatttagttgcacgattcttggacacagcagcaaaggctggctgaacttcctctggcccaggcctgcactacgtgcttcacttcttacctccctgagccttccccgtgaccatcggggtggggaacaggtgcccttcccgggtgggttggcatgggcgccggtggtcctcttggccgctttgctgttctgtctccttagaggggatgcagcgcctcctcctgcatttccagggctggccctctccagccttgtgagactggagattctgattctgtggttgaaggccttgcatgggcaaggcctggcctggggtcactggcctcgtgcacaggagtccaggccaaggcaaggttttgccaaggttggcatctaagacatgtagagacaaagctgcctgtgctgccccgattgcattagccatggcagagaagtgtggacatcagcacaaggactcggggcccagtccctggttttctctaggtgagtaccccctactgggtttttggctatttggacatcaggtggtttctgacagttttgagatgcttgacctgaggacatgaaaggggagctgatagaggacggactccctgtctcttcatcagatcctgcaagggcccatctcccctgcccatgggcagtgccagcatcagattccctgcgtcgaggatgggggccccaggaagccagtttattttggagttgggaattctcttgggctagttgctgcacgcccaccgagccaggtctctgacccaggagggatggagtatctcggaaataagatctgggcagtataatcccagaggatggtgggtgggagagacaacagtgtgttttcactgcaagcctctcatgagcttagacttggagagacatggatagaagccagggggagaagtccagacgggatactttcactttctataaaattaaaatgaataccattccaggctgtcctggaggagcatttgcacgctgtgcagctgtgaggtttggaggggtgaagacaccaggatgcatggctgatccttctctgtgtggaagtctgtcttggagcagtgggtggtacctggtctggtggcaccgggggaagcgaggcccagaagtgcaggttcaggagcccgagctgagctgagcacagggaacacaacagtgtgtttttgctggaagcctctcatgggctcagacttggagaggcatggatagaatccaaagacagaagcccccactggggttggggtggggcctcatctgttgaatggggtggtcgactttccaggagttttccagctccacattcccatgtatttcagggaagccattctgaagcgggaggtggtacagcacagagtttatgcagtcaggctctggcggacggccttcctgtcacttccaggaaccaatgtgtcttcatctatcgactgaggatatgcgtggcccctgctctccctgggcttcgggaggatgcagagtcactggaaagtgcttaatcttgtgcctggtacagagtacctggcattattattagcccagccagctcaaactcaatctccccttccagaggttacttagaaaggtaacaaagaattgtcaggtagtagaaaggcattaagtcttttgttagcaagatggaataaaagtgggccactgagacagttcatagaatattgatggagacgctgatgactcctgagatgctacgtattggatgtgtggattctggaaggttgaggatagtcaaagctgaactccagaatcagtattcagagtgcttgattatctgagcccacaggcctagcattgaaggaacctcctgcaggctaaatgtgaagtttaaaattagggacttggatcagctgatgactgcaaaatagcagagaagggccttcaaagccatgctggggcggggtgtgttggcatgcgcctagtctcagctatgccgaaggctgaggcaggacgattatgagttcaagcccagcctgagcaaaatagtaagacccgtgtctccaaaaaacagaacaaacaaaaatcctgtcctcccgggaagacctagagattgcttttgactaaacccaatcaacaggctgataggatttctcgaaaagtaaaattagcaccattccaggctgaactggaggagcattggaacactgcagctgtgaggtttggagaggcggagacaccaggatatgtggccgtgtgggactctgtcttggagcagcgggtgggacctggtctggtggcaccaggggaaacaaggcccagcagtgcaggttccagagcccctgttgagctgagcttaggaggccctttgtggtaggtaaggggtggaccgtcgctgaagtaccacggccctcactggtagaggtgggcgcactgggccactggctgatgcacagggcacaggcgactgcagaatatctccaagtccctctccgcttgacatttggttcaattactgccagacttgggggaactttccctcaccgcaggtgcccagagttcagatcaggccaagaactgggcccagtgtcaccgtcagctcctggccaactcctcccctcctgctctggggtctctcgtatatgtgtccttcagtcctttttccataggttggcctggatatatgtggaggagtctgaggcatttttgagcttgtggaggaggactgggaggaccttggctttggatgtctggacaagcagaaggcccagggccagggccttgatgtggggaccttcctctgggaggctgccaatgtggcagggcttcccacaatcaggacagattctgtggaggtgttgagatttgcagctcttgtgggtgcgttgaggtgaaagtacaactttattttaggggaaacaaatgtttctgatcaaaatggttaatgtttgtgctgtgtagtagatgcctacagcggcagcctctcccagtggacacctttcgttgggtgaagctgttactgtaagtgccaagatgagaaatgatactgtctgtccttaaggatttaacttttgccactgtcagaggggtaaggaagaagccagcctgggcccttcggtgtcctctagagctgggttgcctcctgcctgtaaaagttaaacaatgtaagaatgcacaaggattctgtagagctccctgtacttcctgggttttgcatgtggcatttgctgagggttccctgtcctgcctgctggcctagggagggggtaaaaagatggaggaagcaggacattgattttggagtgccctgagtcagccccccggatgagcaggaggacatacatgcagggcaaacgggaggttccgcccctggaaatgatgaggtgtgtattccttctgcttctctttgaggcattgatgttttgtgggaggagggagacatttgctgaggggccatttgaacctctccaacatgaattctccattgatcttataatagtgaatttgaagctattttaatcttttttttgagacagagtttcggtcctgttgcctaggctggagttcaatggtgtgatctccactcactgcaacctccgcctcccacgttcaagtgattctcctgcctcagcctcccaagtaactgggatcacagtcacccaccaccatgcccagctaatttttgtaatttctcagtagagatgaggttttgccatgttggacaggctggtttcgaactcctgaccttgtaatctgccctcctcttggcctcccaaagtgctgggattacatgtgttatccactgcacccaacctattttactcttaaaactcagatttttttttttgagactaagtttcactcttgttgcccaggctgaaaactcaaattttatatatagtatttctattgtctttagtctaaacaggatctagatttttattaccaaaacaaaacagcctggcacctgccttgtcatttgtgcttctgagaaaggggcaccgttgatgttgagtcagaacctgtgtgacaaatgctacgctcaggggtagccttgagtgtgacccacgtgctgtggggctcgccccgacaccactggggctctgttgcaggctcccaccttcggagagaagccgtgcaccattcgactcactttttcataatcgtaacacttggtcgtttagaatccaaagctgataaattctgcaaatacccaaagacgagttataacattatctttaaaaatcactgatacctgacatggagccatacatttggagcaagactgggcaatctctttaaatccacattgcaggttttttgttttgtttttttcctgttgaaaagatgtgtgtcaacttaacctactttcgtacctgctgtgagtctaactttgtgcatggcttgctagcacagctagtcacagcctatttggaatttacgagttttttttttttttttttttttttgtcttcttgataaagccctgtgcacatagggtaacaataaggattatggaaagtataaaactaggccgggtgcggtggctcacgcctgtaatcccagcactttgggaggccaaggtgggcgggtcatgaggtcaggagaccatcctggctaacacggtgaaaccctgtctctattaaaaatacaaaaaattagccaggcatggtggcaggcgcctgtagtcccagctactcaggaggctgaggcaggagaatggtgtgaacccaggaggcggagcttgcagtgagcggatcacgccactgcactccagcctgggtgacagagcgagactccgtctcaaaaaaagagagaaatataaaactttttttggaatgtagactattatatcataaccacataaaaagcctcaattaggatgttgctgatttttatctagagattgtccatgaagaactccgtgaagttggaagaacagctgtaaatattaatatactttgcttagtgattgtgtggctttaatctacactgtgttcatgtgtgctgggtttgtgcagccccctgcagtagggccggaagttggagatcataattgctctatgccaaatcttggctggcagcccccagaggagttctggcttgcatccatgtaggagggcctgggagatgcagattggaggcttgttctttaaaggcccagtgggggtctggcctgccctgccctctgtgctgctgctgggacgtccagccaggctgagccacatccttgagctgtcagagagtgatgatgtcctcttctctcaacctggaatgcaccttcctcaccagcagctcttccttccttccgcctctctcctttccttcctgtgtgttctgctgtttgcctaacttctctctatcccttggatacttgccttcctgtggttaaggtgcccctactctgagctgtcccagcatcctgtgaatcagagggcagtgctgaatactgccttgggatcgcctggttcctgggccatctccaccatctaactccatgaggataagggcagcatctgccctgcaggcatctactgccatccttgccacagggctggtgcttagtaaatatttgttgaatggacgaggctgaaatgtgtaaactgcatgaactttttaaagatttgtgtgagcactgttgcaaaatgtttgaaagtagggctgttctggaaaacagtggcattttttaatttttttagacaaggcctcactttgtcatccaggctggagtgcagtggcacagtcatagctcactgcagccttgaactcctaggctcaagtgatcttcccacctcagcctccccagtaattgggactacaggtgcacaccaccatactttgctaatttttaaacattttgtacagacagggttttgctatgttgcccaggctggtctcaaattcttggcctcagctcaggtgatccttgtgtctcagcctcccaaaggattgggattgcaagcgtgagccactgtgcttggctgtagactttttgtgttaaaaggccagaaagtaaatattttaggttttgtgggccatcatggtttctgctgcagctactcagctctgccattgtaacacaaaagcagccacagacagtgcataggctcataagcatggctgtgttccaataaaactttatttatagacagtgaaatttgtatatactctatagtttttgcatgtcatgaaacattcttattttgattttttccaaagtatttaaaaacataaaaaccattcttagctcacaggagtacaaaaactggtgacagtgagatttggcttctaacctgtagtttgcccacctctggtattggttcaaagtatttcatgacaaagactcccatttataaagaatgcaaaacattagtgtaaaatcagagaaaaatgatcaaacttattgggagaagtagattcccaaactgttccctggtgaacatgtgtgcttacttctttttcctttattttataaaattgtggcaaaacatacataccatgaaatttactgtcttaaccatttttaagtgtacagttcagtggtattaaggacattcatgttgtgcaaacagcagcaccattcgtcaccggaactcttttcatcttccccaaagcaactctgtgcccatcagacactaaccctcccttccccctcttcctagcctctggcagccaccattctaggaacgaatctaggaacttcataatcaaatggcatttgtcattttgtgagtggcttatttcacttagtttagacgactctaggaacttcataatcaaatggcatttgtcattttgtgagtggcttatttcacttagtttaaagccctaatggttcactgtattttagcatatgtcgtaatttcctttctttgtaaggctgaataatattccattgtttgtatatgccagttttgcttatccatccattgccaacggatacttgggttgtctccatgttttagctcttgtgaataatgctgctatgaacatgggtgtacaaatatctcttcaagaccctgatttcacttattttgagtgtgtacccagaagtggaattggtaggtcatatagtaattctatttttagttttttgagggactgctgtactgttttctatagtggctctatctgttttacattcccaccactagtacacaggggtttgagtttctccacacttgtttttctccaacacttgttattttctgtttttttttttgtcttctttttaatcatagccattcttatgggtgtgaagtggtatcttactgtccttttgattttcattttcttaagggttagtgatgttgagcttttttttcatgagcttattgatcatttgtgtatctttttggagaaatgtttattcaagctctttgcccatttttaatgtttctttgtttttattgagttgtaggaattctttattctggatattaagcccttagtggatataggatttggaaatattttatcccattctgtggtgttgcctttctactctgttgatagtctcctttgatacacaaaagtttttaattttgatgaagtccaacttctttatcttgttattgttgttttctgtgcacttgaggtcatatccaataaataattgccaaatccagtgcctcgaagtttttcccctgtttcctgctaagagttttacagttttagctcttgtgcttaggccttctgtccattttgagttaacttttgtgaatagtagaagagtccagcttcatctttttttttttttttgagatggagtttcactcttttcgcccaggctggagtgcaatggcacgatctcagctcaccacaacctctgcctcctgggttcaagctattctcctgcctcagcctcctgagtagctgagattacaggcatgcaccaccacgcctggctaattttttgtatttttagtagagacagggtttctccatgttggtcaggcttgtctcaaactcccgacctcaggtgatccgcccgcctcagcatcccaaagtgctgggattacaggcaagagccactgcgcccggcctggcttcatttttttgcttgtgaatatccagtcttcagccatttgttgaaaccatttattgttctttcccattgaatggtcttggctctctgttgaaaccgtttgaccttatacgtgaggatttatttccgggctctctattctcttctattggtctctgtatatctgtctttacggcagctgttttgattgacacttttgattatgagttctttcttagtccatttgtgctgctaggacaacatacatgagactggatagtttataaataacagcaatttattctcatagttctggaggctgggaagtccaagatcaaggcactagcaaattctgtgtctaatgacggctgctccctgcttccaaaatggcaccttgctgctacattctccagaggggatgaacaccggaggggatgaagacaggaggggatgaacaccagcggggatgagcaccggaggggatgaacacaggaggggacgaacacaggaggggatgaacaccagaggggatgagcactggaggggatgaacacaggaggggacgaacacaggaggggacgaacacctgaaaggatgaacacggggggacgaacactgggggggcgaacacctggggggacaaacaccgggggggatgagcaccggaggggacgaacaccggaggggatgaacacctgaagggatgaacacggtggggggatgaacaccgggggggggacgaacaccggaggggacgagcaccggaggggatgaacacaggaggggatgaacaccggaagggatgaacactgtgccctcacatggcagaagggatgcaagggaaggaacccccttccttaagctcttctataaggggcctgattccatccgtgaaggtttcatcctcctgatttagtcacccctcaaagtcccaccatttaaaacgatgacattggctattgagtttcaacacatgaattctgggggacatcagaccatagcagtagctttgtactaaattttgaaatcaggaagtgcaagtccgctagctttgttctttttcaagattgttttggctattcagggtcctttgagatttcatctaaattctaggatgaatttttctatttctgcatgtacctgtttacttttgctgtatttcttaggctggtaggttaagggacatcagtgtttttactttaacttaaagttatcttttaatttttctctcgtttgtagcagcttgatttagtaatcactcacctcaggtgatcctcctgcctcggcctcccagagtgctgggattacaggcgtgagccaccgcgcctgacccaaaatacctattttagaaaacaaactcttcagtccagatgagtccgagtcgtcacgagaccagtgttctgtgatgggctgtagttcagggaagtggattagtgctgctgctttcattcctttggatgctttggtttggtgtttgttaatcccagaagtcagattattaggcctttctgtatttgggtccctctctcggcagctgtaagtgtgacgcatgtccccaatgaaggagactgcttcctttgtcctttgaaggccacgcctaccttgttgcctgaataggagcctccatgagctggtggctgcatttagccctgagttggggctggcattgggagagtctagggtaagacagatttggaggagaagcaagaaggagaagggtgcaactcctctctagtgcctttccaacctttgagaattgtttttcacaaatgatgtttttgcctctaatctggttatttctttgtagtctcagtaatggataagaaatttgccctgtgaattaatcacggtttacagggatgatggcagaatcaaagtatttggggattcagtgatttgccttgctttgtaattttggtttaatttgcagttgggagttgattgagaataatttggaataaaactgttctagaaggaagacatccatgcaaaccattctgtttattctttcaaaccaggtggttttccatattagatgacaggagtctgcagcacttcgtactcaatattcagagtatgtgttttatttattttgtggagacagggtctctgtcacccaggctggagtgtagtggtataatctcggctcactgcaacctctgcctcccgggttcaaatgattctcctgcctcagcctcccaagtacctgggattacaggcgcctgccaccatgcccggctaatttttgtatttttagtagagacggagtttcaccatgttggccaggctagtctcgaactcctgacctcaagtgatccacccacctcagcctcccaaagtgctgggattataggcgtgagccactgcgcctggcccaaagtacctattttagtaaacaaactctcagttcaaataagtcagagtgcctttttttgtagttggccagggtttgtgtaattagtttatcaagtaaaatttgacttgtattgacaagaactggagttgtgatagcaaacagtaattgctaactctatcttatcagggaaatcaaaagcgtctattgaattacagtgactctattatattgccctgtaacctcaccaagatgattcttcggaggatgattaaatgtagtcatgaatccatatatatgagaaagcaaacagatggataaacaaccaaagtaattatcatctgtacattcacatttttccatcacaatatttcagggacctgctggtccagagtcatctgtttggtcattgtctgggaggatgacattcttcataaaatgtgctcggttggtttatctgccgtgcagtgttaccagagggcatttcagctgtttaaactcccagaaagtgttggtagcttccttgtttttattggtgtctagtggacacaggggacaagagtaagtttgatgggatgtatcctgtggttatgagaggagatgctatactgtgtaaagaaacctctaaaaaccagtttaaaaagattgttttatggatagattgcattacctaaattctgatgaaatatttcatttcatggtgctagttttaactttagtcttttaaaacacaaaagtaaaaccaatccaacaacaaaaacatcttcaaaaccgcagttaaacagcatctgtgggccgggcacagtggctcatgcctgtaatcccagcactgtgggaggccaaggcgggcggatcacgaggtcaggagatcgagaccatcctggctaacacggtgaaaccctgtctctactaaaagtacaaaaaattagccaggcgtggtggcgggtgcctgtagtcccgctactcgggaggctgaggcaggagaatggcgtgaacccgggaggcggagcttgcagtgagccgagatcgtgccactgcactccagcctgggcgacagtgcgagactccatctcaaaacagacaaaacaaaacaaaacaaaacaaaaaaaacagcatttgtggattgtacctgtctgagtagtgtataatcacctttcctagacaactttgcctttctcagcccgcctttgcaggtgaggtgctcagacttaaaagtcccatgggaagataattttgccaattattctcttttaagctgctttgtttaaaggattctaaagtcacatcatgaggaggggagagccaagagggtgtcggatgtgtgttgtcactctgatatttgctctttttcttttttttttgagacggagtctcgctctgtcgcccaggctggagtgcagtggcacgatctcggctcactgcaagctctgcctcccggtttcacaccattctcctgcctcagcctcccgagtagcgggactacaggcgcccgccaccacgcccggctaattttttgtacttttagtagagacagggtttcaccatgttagccaggatggtctcgatctcctgacctcgtgattcacctgcctcggcctcccgaagtgctgggattataggtgtgagccaccgcgcccagccgatatttgctcattttctgagtgttttgtgagtcctgaggaatgagctcaaggaggagatgggttcattccttcttctaggtttcttttcgagtggggtgaagctcacttttagtttcaggtggaagctgtgcactggattcatttgggagcaggttggcaggtagaacagtagaataaatcgtgaagacctacaagcgttagaatgcgagaggaatggatggagctgctccttccttctgatttgcaggaagtttccttaatggaacgagccagccccgagggagccgagccagccccgagggagccgtcatctgggaccctgggatctgcgatgcagcagagttccattatcccgtttatttttactgtaaatacactcaatgttacacaaattcattaaaagataagcatgatctgtcctgttgggaagcttctaatggaaagtaggggatagctgatgattcctctggatgggcgtttatttgcaagatgtttctttccagaaaatgcttaactagattacatgtttcatgacctcagtataaattcttttagttttcctgaccttttgtgattttagttactatcctaaaatatattgatttctttttcttgttcatctagaaatgatcattaaaaacaaacaaataggccggacgtggtggctcacgcctgtaatctcagcactttgggaggctgaggctggtgaatcatttgaggtcaggagttcaagaccagcctggccaacatggtgaaatcctatctctaccaaaaaaaaaaaaagccagatatgttggtgtgtgcctgtaatcccagctacactgaggcagaggcaggagaatcatttgaacgtgggaggcggagactgcagtgagcagagattgtgccactgcactccagcctgggtgacagagagagactccatctcaaaaaataaaaacaaacaaatgaaaggtttaagaccttctttgaacctgactgccttactttctttggcaagctaatttttctgaggtcaagagagtaggtgctggaaccaaactgcttgggatcagatcctagacctagcactggttgacctgaggcaagttaatctctgtgtgcagcctttctgttaaatgggagtagtaatagtggttgtagcataagattgaggttaaacgagtaagtgtatgtaagcacctactgaatgctatttaagttaatgcaatcattcagtggatttcggctaaattcatgcattcagtaaatatttaccctgtgcctgcaaaatgactgctgtgtgcttggccctgggatacaatagggactgaagtagatatgggggattggcaagtaagtaggcagccacaagacagctgtgaatggtaggagggagaaaggactaccaagggaggcttcctggaagaagcggctttttaaataggtgctttgaagagattagatatgagttaatgagatgaagaggggtaggaaggagtagcatcagtttagctgagggccctgaggtgcaagagtgcacagaccactgaagttcagtctgggtgagtcgaggcgaggctgggtgccaagcagggtcgtcccaagctgtctggaggaatttggacttaatgctcagagcagtggctggtgattgaaaggttcagagtggatgattcttgaagggtccagagctatatcagattttgttgcaggaagagttcatgggcagtggtttgaagaacgggaaggagaggagacaggtgatggggaggcatggcagccgtgcaggggaggtgatggggcctgagtggggttgatggtggtgggggtggggaggagccagtgggtttgagaatattaggaggataaggagtgccatgtcctgactgattggttgtagacgaggggagggaagtgtctaggcctggatgcaggggctgctggtctccggtggtcctggagaaggatgaactcagggtacagttcttccccagcactgggcacagggtgcagggctgtgcccgtggtagacagtaggaaatgcttgctgcaggaagccctcagcacgcagagccatgtgtggtctctgaaccttgcaagcggacctgccgaggcagctgttgggtggctggagcagtttacgcagttgggagtcagcacgaagatgcgtatggaagcctccagagatgacctgtgtgggagggtttggaaagtgaggagaagctgaggagctggagtcccaaagaacaactgcgcaaaggactgagatggaggagaccggggagcggaggcccagggaggacaccaagcctgaggaggaagtgactgggaaggaaaagaaggaagagtgtcattgctagggtgccctcggctctgcagggcacgtatcagtggcgaggtggattggggctcgtgtgggcaatgtcgccacagagacttggctgcaaaaagacaagagagctctcagtaagaagctggagagggtgttatcaacagctgtgtaacagatcacaccaaaacctaggagctgaaaacaatgtttttgtttttgagactgatcctctctctgtcacccaggctggagtgcagtggcagagtctgggctcactgcagcctctgtctcccgggttcaaacgattctcctgcctcggcctcctgagtagctgggattacaggcgtgcaccaccatacctggctaatttttgtatttttagtagagacggggtttcactatgtcagtcaagctggtctccaactcctgactttgtgatccgcctgcctcggcctcccaaagtgctgggattacaggtgtgagccaccgtgcctggccagaaaacgttttttatccagtttctgtgtggcttagctgggcccccagctcaggccctctgaagggctgtatttaaggtgtccacgggggacagagtcatttcagggtcttactggaggagaatcagcttctgagctcacatggtggtgttggcaggattcactttcttggtggctgttggcagagggtacttgcatttccttcccacgtgggcctctccataggggcagctcatgtagggctggttttgtcacagcaggtgagtgggaggcagagggtgcagcggagagggggagagggaaagaggggagaaggggaaagagagagagagagagggagagagagagagagagtgcacacaaggcagaagtcagagcccttttgtaactgaatcatggaagtgacagcccatcactggcagtattttattggctagaagtgagtcactaggtccagcccatactcaacgggatcatttttatggattttcttttaggaaatgaatggagtgagtcaaatactctttacctgtggacatgctcagctgtgcatctggttttgctgccaccggcctctttttccagtcccaagaaacacgtgttcatgaatccacttgggtgcaggtgcacatactgtatggctggcggtcgtgagcagtttcttcgaagtttctggcactttgctgatgcaggcagttcagtgtcggagtggccaagagcagggggttttgggcacacctctgccgtgcatctcatgattgccgcagtgctttattgagcgtaacaacttggaatgctcaggtgtggtttgcggcattcacttgctgatgaacgttcataggcagagacgctctggactctttttaaacagctttctcgagcagttactcacataccatgcagggtatccactgtaaaagtctgccattcagtggtttttggcatattacattaattttttaaatttatgggaaaaatatatataacatagaattttcccctttaaccctttaaaaatgcacatttcattggcattaaatacatctacagtgttgtgctactcattctctgtttccaagactttcaccgtcccagacagaaactttgtatccgttaaaagctaattcttggccagacacggtagctcatgcctgtattcctagcactttgggaggccgaggtgggtggatcacttgaggtcaggagttcaagaccagcctggccaacatggtgaaaccccatttctactaaaaatacaaaaattagctggatgtggtggcgggcacctgtaatcccagctacttgggaggctgaggcaggagaatcgcttgacccggaaggcggaggttgcagtgagctgagatcgcagcactacactccagtctgggcaacagagcgagacttcatctaaaaaaagaaaaagctaactttccattccctgtcccctcagcctccgttaacttctaatctattatattttctgtctctgaatttgactactctaggagccacataggaacggaattgcacagtatttgtccttttgtgcctggctaatttcgcagagcacagtatcttccgggttcatccatgtcacagcacacgtcaacacttccttgctctgaagaatatttcactgtatgcattagccacattttgtttaatttgttcatctcttgatggacacttgtgacatggtttcttcccagcatttgactgttgtgaacaacttgtccactctttgctggaggaagtgcgttagtgcccatctcacggtcacagcggacaggctcacttcttggatcagacgctcattgtgaagcagatcaatgcagtgagaatgcaggtctgatcctgtccccccatccctggcccatgactggggagagatgcggtccaaggactggtacctggaggcttggcagcagcatgccctccttcctcctgctctttgcctcagtctttgcgtgcagaaatgggattgctgttagccctatttcatagggttgatatgggatgatgtggtattccatggtgtttctggtctttctcagggcagaataaagtttacctctgccatgatgatggtggtgctggtaatgtggttgatgatggtggtggttggtagtactactgttggtggtgatggtggtggttggtagtattactgttggtggtgatggtggtggttggtagtattactgttggtgatggtggtggttggtagtattactgttggtggtgatggtggtagttggtagtattactgttggtggtgatggtggtggttggtagtattactgttggtggtggtggtggtggttggtagtattactgttggtggtgatggtggtggttggtagtattactgttggtggtggtggtggttggtagtattactgttggtggtgatggtggtggttggtagtattactgttggtggtggtggtggtggttggtagtattactgttggtgatggtggtggttggtagtattactgttggtggtggtggtggtggttggtagtattactgttggtggtgatggtggttggtagtattactgttggtggtgatggtggtggttggtagtattactgttggtggtgatggtggtggttggtagtattactgttggtggtgatggtggtggttggtagtattactgttggtggtggtggtggtggttggtagtattactgttgttggtgatggtggtggttggtagtattactgttggtggtgatggtggtggttggtagtattactgttggtgatggtggtggttggtagtattactgttggtggtggtggtggtggttggtagtattactgttggtggtggtggtggtggttggtagtattactgttggtggtggtggtggtggttggtagtattactgttggtggtgatggtggtggttggtagtattactgttggtggtgatggtggtggttggtagtattactgttggtggtgatggtggtggttggtagtattactgttggtggtgatggtggtggttggtagtattactgttggtggtgatggtggttggtagtattactgttggtggtgatggtggtggttggtagtattactgttggtggtgatggtggtggttggtagtattactgttggtggtgatggtggtggttggtagtattactgttggtggtgatggtggtggttggtagtattactgttggtggtgatggtggtggttggtagtattactgttggtggtgatggtggtggttggtagtattactgttggtggtgatggtggtggtggtggtaatactgctggtggtgattgtgttggtagtactgatgttgctggtgagggtgatgaaggtggtaatactgtccagccgggccttttgagggcatctggatgaacctcttttttacgtggggtggggtcgggataggcaccctgaaacagggccctcaaaatgctccaggccacagatggagaaggaaagtttcccgatgtggggttgcagggtcaggtatgctgagccagaggcactgcttcccaggaatcctcacctctcggagcctgtgatgcgggcgcccagctgtgcagctgccatccagcctggatcccaagcttcccctccctggaatcattgtgagctgctctgatcctttgggctggattttccatcctctccctcaaagggaaccttgccccctatgcctttcctgaggttggggatatgtgtgctgggcctggcccagggtagtactggggttgcgtgagaaggcaggtctggagctggttgtatgcctgggccccgcaagctgggctttcagaatccctttcagtggcccgggcccaccccctggaccctgttccctttgtaactgagctttcgtctttgctttggttccctggccacccttcgggatcctggcctcccctttctgggagtggtgcacgttctgctggggggaggtgcatcctgcccttgctgcctgcctggcactctgggttcccctctgcacttgtttgctgatccatctccattgattcccgaaggtgtttattgaaggtgacctgggttgggggacatggggttaacacacccagctcctgctctcctgcagccctctccctgtggggaatggggagccgcaggacagcccctaagctgtctagtgcctctggggattccaggaaggcacttcttggttggacatgttgcttgacaagtgcaacccaggcaggatttcggctcccacgtgtcccttcagccctgagcctttggcagtgaacacacctaccaactatacatggcagtccaaagtgggtaggtgtgtgagggagggttggtcctatgatgagacccattcttgtgaattcctttttcccagggcatcagtacatcccctgcttaatttcagagcagcaagggcagagctgggacatggttggatctctctgtgatgagagcatcgggtgttgaatgtcctttctgtgctataactataaattcatgttagacagcaaaatgtaggcgtttgactgatgcaggaaggatctggaggggaaaagtattactcaagaatatttcacctaaaaaggactttgtgacaaggtttgcttgtgacagtccttgtatgatattgggtgatatttcttgtgacttttgttttgacatgtctctggctggttttatgagggctatttggggagcaccaaagggagagtggccagagaggcaaagctctgtctggctctcgatgggagggctgtgcttttttagagtgtggagccgcgtgttatgcagcatgcagtgttgtggctagggacagaagctgggtcagaaacattagccccccaaagcaggtttctcccaccttctagacctgcgtctttgaggagccatctaacatcctctctaagcctcattttttttttccatttgtgaaatgggaatgagtagtaatccctcccttgtaaagtttttgtgataatgaaattagataaattaggtagtccacgagaagcagtcagtggctgttccatggtaaggggctaatagctctcattacagcttttcctagttgtgttatttggagagcaggttcctaattcgagttcgccacagcttatctgtgtcatgtcttgtctcctctttgggtggcagttcttacctgggatcttgggtggtaaatattggtttgttggtctggattgactggatgattggaggtctggtctgtgcttgcctgcagggtcagcttagcctagctgtgacatgtaaaggctctctctcctttagactggggttccattcatgggattaatggaattgttatttcatcttgtctcaagggctttctggaataagggcaatggggcctttgacagtgcccagaattgtcactgtccctttgaagcaaagggaaatcggttgcagagagagggactctgcagcctttgttgtggacgcagcagtacagttactctttgtttgggatgtgctgggagtgctgttctcagagcaaggccacatgatgcctggaggtggggcggcagcatgccctccttcctcctgctctttgcctcagagtctttgtgtgcagaaatggggtttttgttagccccacttcatagggttaatatgggatgatgtgaggaaatgcgtcaagtgttcgttggagtttctggtctttcccagggcagaatgaagtttaactctaccatgatgatggtggtactggtgatagcggtggtgctggtgatgttggtgatgttattgttgatgatggtggttggtagtattgctgttggcggtgatggtggtggtggtaacattgctggcggtgattgtgttggtagtattgatgttggtgggggtggtgaaggtggtagtattgttggtagtagtagtattggtgatggtggtggtagtattgtttttggtagtgtttttagtattgatgatagtggtggtagtgttgttggtagtattgttggtagtgttagcatggttgttggtggtagtattactggtagtagtgttggtgatagtggtgatggtggtagtattggtagtggtggtggtaatattggtgatggtggtagtattgttggtaatattagtgatagtggtggtggtagtattgttggtagtattggtagtgttagtagtggtagtattgttggtagtattgttggtgatagtggtgatggtagtattgttgatagtattggtagtggtggtggtagtattggtgatggtagtagtattgctaatattagtgatagtggtggtggtagtattgttggtagtgttggtagtattggtagtagtggtagtattcgtagtattgttggtgatagtggtgatggtggtaatgttgtttttgttggtattattgctgttggtagtattgttggtgatgtgttggtggtgattgtggtggtggtagtattgttggtagtgtttttggtagtgttggtggtggtattgttggtggtagtattgttgtttgtagtattggtgacaatggtagtagtagtaagtattgttgttggtattactagtattgaggcagaagaatagagcctggaggcagaagacctaaggacttcctagaactaaatcaaatggaaacacgctgtgacaggaaataatctcttcatttacattgggtgtacactgagtaaatgactatgtaactttacttcagcctcttcattttttttttttttgagatggagtttcactattgtcacccaggctggagtgcagtggtgcgatctcggctcactgcaacctccgcctcctgggttcaagcgattttcctgcctcggactcctgagtagctgggactacagatgtgtaccaccaggcccagctaatttttgtattcttagtagagatgggatttcaccatgttggccaggatggtatcaatttcttgaccttgtgatccgcccacctcggcctcccagaggggtgggattacaggcatgagctaccatgcctggccagcctcttcgtttatatagggtgtacaccaagtaaccaatggtggtggtagtattgttggtgatacggtagtattgttattgttggtagtgttgtaggtgatggtgatggtaatagcattgttattgttcatagtattgtaggtgatggtggtggtggcagtagtattgttattgttggttgtattgttggtgatggtggtggtaatattgttactgttggtagtattgttggtagtgttggtgatgtggcggtagtattgttggtagtgttggtgatgttattcttggtagtattgttggtgatggtggtggtggtagtattggtggtagtattgttggtgatgtattattggtagtgttggtgttgttattcttggtagtacggttggtgatggtggtggtagtattggtggtagtgttgttggtgatgtagtattgttggtactgttggtgatgttattcttggtagtattgttggtgatgtagtattgttggtagtgttggtgatgttgttattggtagtattgttgttgttggtagtattgttggtgatgtggtagtattgttggtagtgttggtgatgttgttattggtagtattggtggtagtattgttggtgatgtggtagtattgttggtagtgttggtgatgttattcttggtagtattgttggtgatggtggtggtggtagtgttggtagtattgttggtgatgtggtagtattgttattgttggtagtattgtaggtgatggtggtggtgatagtattgttattgttggtagtattgttggtgatggtagtggtagtattttttgttggtggtattgttggtagtatagttagtgatgtagtgttggtggtggtagtattgttggtgctgctggtggtggtagtatttttggtagtggtggtagtatttttggtagtggtggtagtattttggtgatggttgtgaagtattggtgatggtggtggtggaagtattggtagtaattttcgtagtgttggtggtggtggtattgttattggcagcgatggcagtggaggtggtagtggtggtagtactgttggtagtatttttagtagtgttggtagtggtggtattggtgatggtggtggtggtagtgttgtggtgtggtgtggtggtagtggtgatggcagtggaggtggtagtggtggtagtattgtcagtgatggtggttgtggtagtattgttggtagtatttttcatagtgttggtagtggtggtattggtgatggtggtggtggtagtattgttatcggtggtgatggcggtggaggtggtgatggcagtggaggtggtagtggtagcaatattattgatagcagttttggtaatgttggtggtggtagtactgctgatggtggtggtggtggtagtattgttaatcagtggtgatggcaggggaggtgctggtgttagtacactgtcatcagtggagctcccatttttcagctgaatgccttcgtggcataggcctcctgggaatgagtgtgggtagaacgtccctcatttgtggttgagatttttccctggagctgtgttggtgggggaagccttgttccacgtgtgttggggttagagggtgtgtggctgctcagtggtcagctttgatgtcacctgaaacatgttacaggtgagtcaggtggagcattggggaactgcagggagaggagtgttttctgatgtcagagccgatggagctttaaaagctaaaaatgaaacaaacagaaaatgtggagagatgttcagtagtttgctcggtacatttttaaaacttccgagtggtcctgtgtgttgggtgtcatggtggacacactgtcgtgggcgctttctgggcaaagtctcccctgcctgccctttatccttgtgtgctttcgtcctgcccagcagcacctctgtaagcaagcaaacagggttttatagcctcttgctgagtatttctcatctcttgctaagtatttctactgtggtgcaaaagcaatcttattatgtgttgctgtatttttatagtcaattgaaatgactattaaaatataacattgctcatcaggctcagagcagcactgctggagaggcctgcccttgcagatgaggcagctgagtcctggaaagagaggccttcttgggaatcacagccgatgcaggggcctgaggcctgggctgctatgtaggaccctccacaacctcagaacagtcctgggctctgctgtcacatcttgaaatgttttttctattttctttattgtggcaagatatatataacctaaaatttcccatttgaaccatttttaggtgtacagttcagtggcgttaaacacactgacgttgttgggcaaccatcaccaccatccattgccagaactcttttcttcttcctgaagacagactctgttcctattaaacactaactcccattccctcctcctcccagcccctggcagccgccgtgctattttctgtctctatgcaagtgactactctaagaacttcgtgtaagtaggatcacacgcttctgtccttttgtgactggcttatttcactcagcacaatgtcctcaaggttcatccacattgtagcatgtgtcagaatttccttttttaggtgtgggtagtatttcattatatgtacataccacgttttatccattcatctgttgatagacatttgggttgcttctgccttttagctattgtgaataatgctgctgtgaaccttggtgtacaagtttctgttcaagtccccgctttcagttatgttggtattgcctgatcatatagtagttgtatatttaacttttgaggaactgccaaacggtttttccgcggctgcaccattttacattcctgtgaccagtgcacaagggtttctgctgcttcagatccttaccaacatttgttatttatttaaataatagccatcctaatcatctccaaatgtatcacagtttttgttttttgtttcttttttcttgagatggagtcttgctctgttgcccaggctagagtcagtggtgcattctcagctcactgcaacctctgcctcccaggttcaagtgattcttgtgcctcagcctcccaagtagctgggattatgggcatgcaccatcatgttcggctaaattttgtcctttttgtagagaaggggtttcactatgttggccaggctggtctcaaacttctggcctccaatgatccgctcaccttggcctcccaaagggctgggattacaggcgtgagccagtaatttatcataatttttgaacaaaggcctttacattttcattttgccttgggccgtgaacattttgtagccagtcctgctgggaactgatgcagcctgggtgttctgtggagccccgcccatgttcggggcacaagggtttggccaggtgtcagtttaagctgctggggaagacaggctggcgctgtctggggttaaaggtggttcccagaaggcccagatctggggcagagtagctctgtgtgcagtgagctggcaggcaggagggatggctgtcttggcttccgctgttttatttagtgccttacctagaatctgtattcctgccgagtggtcacgttgcacaggggctgtgagcagttcagtggctcactctgtgaagggcggcttaccacacactttttgggtgctctctagggaaggaaaatttatcaagcagttaactaaggaaagattcgtttgtgtcctctgggaactgacactgcacactagctggctcaaatagtggtgttgagggtagcctttgggtgagacctgtccatatgcctgttaaaacagatgacaaaggcaggcagcccaggtctggtcaagtcgggagccttggctccctcctccaaggctgtgctgggatggactctctgccactgttcagtttcggtctgcaagtatggaaatgcccgcgtctctgcagccggcgcatctgggccaggcccaggctgccactgtgcagttgctgatctgcctgggaacaagagggctatgtctgggccgcctgtgcctcagaagagctcatcagcagtcagcatctgaggtgtgcaaacacatctgagcagacttctccctccagagctctgccccgttgggacttctggaagcctgagatttcaccagcagaaggtcctgtgtgtcctgacctttaggatctgagagtgacttcgtaccttcttgtgctaaggcctacagcctacgagcatctaccctctgtctagttagaagtgactgtaccaggtcctggtgcagctgagtgagtgggaggagaggggctcaggaggggagcacaggaacaggagctgggcccggctgagctgctcagtgggaagatggcaagacactgcagatccttgctccccgcccacgtgccttgctgggagagaaaagcagctcctcagctcgcactggggccgtcttaaaatctaagcaaatgtttattgtgcacatgtagggtggccccggctggatggaccttcatatgcaggagctaatacacactcaccagggacccctttgctgtcatcctcccatttcatggagggagaaactgagcttcacagagtttgtgttgcttgtcagggcacagaacaggggtttgggaccgagtccatgtcttgattccagaggctgagtgcttggctcagagggagggagtggccaggctggtctgcagagttccagagattttgcctgagcagtggggggccaccagccttgaaaatgggcattctctctagggtcctagaggaggctcaggccagagcccacagggaggaggcaaagtgctttgtcacctgagaagcccccacattggagggaacatgggctctccctgggcacaggctgcacccgacgggggaaagcggggaaggggtctctgcaagggggtcctctccagcagcctgtgccaacaggcactaggctttattgttttcctcacagagggctcgattggtttttaatcttcaattttacttttttatcaaagctaaataatgtaacaacgacagaggaggaatttcaagcaactacaaagaaaccaaatattttttggcgagtccctggcgtggctgcctttccctgtcttctccctcctggttgcagtatggacagaggtgtcacccttcaggcttggggacggcactgggctgctggctcacctgaagatgcctttggcatgtgcaacttctccaaaagtgcaaacgcctcccatcaaagtggaaattccatgggccaaaaacagattcacaaaacagttcacgctggaatgttcaatccagccttatttatttatttatcttcgtttttatttttttcagagccagagtatcactctgtcacccaggcttgactgcagtggcacggtcatagctcactgcagccctcaactcctgggctcaagtgatcctgcctcagcctcccaagtagctgggactgcaggtgcccaccatcatgcctagctaatatatttcgttgtagatacggagtcttcccatgttgctcaggctggtttcgatctcatgggctcaagtgattctcccacttcagctttccaaagtgctggttttacaggtgtgagccactgtgcctgactgcagccttatttataataactcaaacctggaaacaaataactcaaatgtccatcaacaggagaatggatagacacattgtgatgtgttgatatgatggaatactattcaacaatagaaaataacaaactactgatacaacaccattcatgtggctcaaaatgttgagcagaagaagtcagacataaaggagcacataggattccgtgtatttgaagtttaagcattgaccgttatttatgacttatctatggtaataaaaattagaaaatggtgttttgggagaaaaatctcctagagaggggcttgagggtactttctggatctcttcctatcttgggtgtacacggcgtatagaattatataaaagtcactgagctgatcacctaaagactgtgtgttttattataccactaacatacatgtgagtgtatacatgtagatggatgtgagcatatttatgtctgtatatatgcccatttgttacatggctcatggtgttgaacttttttctgtagttagagatattggatgtcatggtccacggtctttgtgtaatacgcaggaatgttgctgctttggctccgtaattttaaactcacagggtttgttggggcttcagaagccagccatacagagggtaggttgacagggaagtcacagctcatggagaccagagcagggactctgttttggcattttggcacaatgggtattcccacatctgtacagaaggtgatcgagaggtgatgatgtcttgatttacaggaccggaggctgggtattctggagccgttggtggggtcagggctctgttaggtaaagcaggtaggttttctctagaaggctgagtcctttgggcacctgggtattagtatactagaatatgtgccacagggctctatgacaccttcctgattctagtgggttggggacctatgaggaatcttcttcattctgagggaggcgctgcttagttcttgctgtttcactccgctcagatgtgttcaggggagggtcactgctgagtgtttttgtgtcaaaaagagtcgaactctgtgaaatatttgaagagatttattctgagccaaatatgagtgaccatggcccgtgacacagccctcaggaggtcctgagaacatgtgccccaggcggtcggggtgcagcttgattttatacattttagagacgcatgagacatcaatcaaatacatgaagaaatacattggtttggtccagaaaggcgggacattccaaagcaggggcttccaggctgtaggtgaatttaaacattttctggttgacaattggttgagtttgtctaaagaactgggatagatagaaagggaaagttcaagttaagataaagattgtggagaccaatgttcttttgaagtcttacagtgggtgcccttagagacaataggtgacaaatgtttcctattcagatcttaatctttttagggtctggaataaaaagatctagctatgttaatagagattctttacagatacaagttttcccccacaaaacagctttgcagggccattttaaaatatggcaaagaaacatgttttggggtaaaatattttgattttcttctttgtctcataatgttatgccagagtcaggttggaaagtaaatcacgatatatagggttatataaaacccatctgatgagaatttatgatttgtggggcatgacttcccagaccccttagacacgaatttggactagataaaaaaaatcagagtttagcccacacatggaaggggagaccctctgacgtgccaggctgcatcttccccaggtgggccctggatcagagccagcgtgacctcctcagtctttgctgctgcttacagctccttgagggtgtgtatagctgccctggggaggatcgttagcaccatttgttcaagtgaaatagagtgtgctttgtttctggacataggggttggatctccaggacatgcctacctggttagactgttggaagttgtctttgctagtcaagatcctggtctgctctttagtttctttcttttttttttgagtcggagttttgctcttgttgcccagactggagtgcaatggtgcaatctcggctcactgcaacccccgcctcccgggtttctcctgcctcagcttccagaatagctgggattacaggcatgcgccaccatgcccggctaatttgtatttgtagtagagatggggtttcaccatgttggtcaggctggtctcgaactcctgacctcaggtgatccgcccgcttggggcttacaggcacgagccaccgcatttatttgcttgaagtaagtacaagcaaagccgcagtggtttccagtgggtttaacattcaggtaatagttttactgccttgacttcctctatttatttattaagtgattcactcagtgagcatttgtggcactccaggtgccaggcactgttaggcatggctgctgagatggagaagatgcaggtgtgaggtacagagaggtcaaggggtcaccagccatgtggtattgtagtgggggcatggcacaggaggctagaggaggggtcctcagtggtggctgcacttgagaagcctttattgggcacctgctatgtgacaggcacggacagcagtgagcagtcgcctggcggtatattgtcgggatgtgcaaggctgctgttgagcgctcacatgaggcctctgactgtcgtgggggagtggcagggaagggtttcatccagaggtgatggggacctggagagccaagctggggagaggtagggctgtggaccaaggcctgaagttggagggcgcatggggactctggtttggtttggcaagaactcatctgtttatatttgcataatgacaaagcctcttctgggatgattggatgattgctggctttatttgtgaattataaacagacctaccctcaaatatatatatatatatatatatacacacacacacacacagacacatatatacgtatatatgtgtatatacacacacacacacacacatagatatatacgtgtgtatatctatacgtatagatatatacatgtagatatgaacccaatagaaaaaaaaaaagaaataagatagttgctgctagttgtggataaggcatacagagatattttattccgaagaaagatattaaaatgtcttttactgtgtctatcagttcagttagaatgtgaggaaaggctcttttgtatatttcttttcacattcttatcttcaccatccctcccacctgtttccaaccaaaagccaaaaagaaatattgaataacaaatgatggttcctctgtctcaccaggcccagctagctctgtttccttaattaggtagatgactccttgattctgttacccaaacattgcatgaaatactgcctcaggggattctactggcagagccacaatctttctgttcctaagaaagatatgaacccaaaaggagtgacttggtgactttgaaagtggtgtcctttttagaaatgtggggtggggccaggcgcggtggctcacacctgtaatcccagcactttgggaggctgaggcgggcggatcacttgaggtcaggagttggagaccagcctggccaacatagagaagcgctgtctctactaaaaatacaactctgtcttccccagtgaaactcagcacccattaaacactaactcactccttcgtcctcccagcctctggcaaccccctttcttactttcgtttcttacttgtctctgagtttgacaactcgaggaagaggaacctcatgtaagtggaatcgtactgtatttgtctgtgactggcttatttcatgcagcataatatcttcagtgtcttcaaggttcacccgtgttgtaatgtgtcaacatgtcctttcttttaaggccgatggatattccactgtatgtatgtgtaacatgttgttgagtaatttacctgttgatggaaacttgggttagttccactttttggctgttgtgaataatgctgctgtgaacatggatgtgcaaatatctattccagaccttgcttctggttctcttgggtaggtatccagaagtggaattgctggatctcatggtaatttgctgctttccacagcagctacaccattttggagcccaccagtaacttgcagagttccagtttcttcgtgtccttaccaaggttgttattttctgttttggtttttgctttttttatttttttgagacagggtctcactctgtcacccaggctggggtgcagtggtgcgctctcggctcactgcaacctccgcctcccggattcaatccattcccctgcctcagtctcccaagtagctgggactacaggcatgtaccaccatgcccgactctttttttttttttgagatggagtttcgctcttgttgcccaggctggagtgtagtggcacaatcttggctcactgcaacctccgcctccccggttcgaacaattctcctgcttcagcctcccaagtagctggaactccaggcgcgtgccgccatgcccgactaattttgcatttttagtagaaatggggtttctccatgttggtcaggctgatctctaactcctgacctcaggtgatccacccaccttggcctcccaaagtgctgggattacaggtatgaaccactgcacccggccagttttggcattttttttagtagagttgggatttcaccatgttggccaggctggtctctaactcctgacctcaagtgatccacctgcctcagcctcccaaagtgctgggattacaggcatgaaccatggcgcccagcccccaggaattctttatatattctggataccattcccttaacagataggggatttgtaaatactttctccccttctgtaggttgccttttctctctgttaataatattctttaatgcacaagagtttttaattttgacgaagtctaacttagctatcttttcttttgttgcctgtacttttgatataatatccagtaaatcattgccaaatccagtgtcatgaagttgttcctctgtgttttcttctaagaattttatagttttagctcttatgtttaggtctttcatccattttgagttaatttttgtgaatgatataataatccaacttcatttttttttgcaagtggatatccagttttcccagcaccatttgtggaaaagactgtcctctccccattgaatagtcttggcatccttgttgaaatcatttgactttctatgtgagggtttacttttgagttctctgttctatcccatttgtctgtatatttgtctttatgacagtactacactgttttgattactgtagctttgtagtaggtattgaaatcgggcctccaattttgtttttgtttttcaagattgttttggctaatctgggacctttgagatgggtttttctatttctgtggaaagtgtcattgggattttgataggagttgcactgaatctgtagatcgtttcggatcagcattgacatcttaacaatattaagtctcccactccatgaacacaaatatttttcagtttgttcatgtcttttatttctctcagcaacatttcgttagttttagtttacaagtctgtacctccttaagattattcccaagtatgttattgcttttattcagttcatctttaaaaaaatattagagacaatacttttaataacaccattataaccaggctctaagaaacttccttccctctcttccctcccttcacttccgtcctttcgcttccctcctctccctctccttccctcccttcccttcccttcccttcccttcccttcccttcccttcccttcccttcccttccctccttccttccttccttccttccttccttcctccctcccttcctcccttccttccttccaaggcctgctgtgtgccaggtgtttttagatgattgcgaaaaataagatgcagattttgtccttgagaggctcacagtcaagtggaagaggcacaggtgattaaatggtggcagtgtgatacagtaagtgctaccattcaggctcatctctctaggaggctctaatccagcctaaggcatttgcccccagacaaaagcagtggaaggattttactacaggtcgtagaagcttggtgatggcgtggctgccagtttgattttgaagatagagtttaggaaacccagcctccagctccaagtgggtgccatctaaagctgcctgatgaatttatccttttatttgtggctactgggatcacattctcgctagtagtacagtgggtaatgttgggtactgagccgtttgcaacaatacagttgacttgttctccatcttcaccaagttgctataaacggctggtctctgccccagggtcaagttgaaagggtgtgtataatgttctgtttctctctacatggtgtttcctgaatggctcagtgaaaggttgttccttggagacctagcttaggctgatttcctctctggggttacatctggcttatctcctctctccaagcccagctcagtgtggaccagcgcaggggcctatggaggcttaggaaatgcaaggtacctgcatggaccaggcaaacgtgtagggtgtgtgaagttcgagaccaggcggatggccctagggtgaaaccctgtaggagcacagacagggagggccctggcattgggccgtgtgaggacgtggcctttgttttccccagccctgagaagatgcataccattgaaaagcgtttccaactgaaggcaagagaaaggaaatgagaacacagagcaattaattttcacaaattgactttaaaagaattaattaacgtttaagttgctacttgaagtcttgaaatcatgtttcagtggtgtgtgagacagagagtgactgagccgagttgatttcaaggagtaacgtatggccacccctggcctttgatgctttggggaggctatggacctgagcactgatggcaggtgggctatctccttagatcaaaaagacccacagcagagctggcaaagctaatattgtgtttctctttcttactgattaagtctcagcctctgtatctttttgcagagggcaagagcattttgaagacgaacaaatgctacagcttttgcttttcctctttcagactgcatgaggaagagtactttgggatctggttaaattcagtgcatttttattgagtgcctgcaaggtatggttttagctactgtgggaaatccaatgattaataaatatttacctccctcaaggagtttgtgtctgatgggagagacagacttacagatgagcaactctacaaggttgtggggtggcacagagtgtacagggagttcagaaggaagccattcatttaggtctgcgtgtaacttcttcttggtagggggagaaataattctgttagggcctggaaaaggctgtggaattaaaggcaggccttgtagacaagtggggcagtcggaggcggagggaggaaggattttcagctgcagaggagcgtgtggcaggcctggcagggcaggtggagccgaggagggtgagggggctgagatgagatggaaagatgggttgtgtgctggagaaatgagccatcattcagaatgctcggcgaaatggtcccagactttggagtgagagttcaggaaggtaactggtgatggagagaagggaagacagtctgtacatctcaccgaggggtgatgaagtcttgggccaggcagtgtggagtggtgagatatcctgggagggaagtcccaggatcccagggctgccatcagctcactgtgtaccttgagccagtcacaacgcccctgtagacctctgttttcatctgtgaagtgggctgatgggcttactatgttttttctcaagtgagagtagtcaagttgttttttttgcttttccctgaatgggtgttacatttcattaaatgttttctctgcatcagttgagatgatataataattgtatgtatttatggggtacaccttcatgtggtacatatgaagtatggtgatcagattagggtaattagcatgtctctcatctcaaatgtttatcatttcagtatcttccttccagccatttaaaactgtatggtatattatggttaactatagtcatcctaaggagctatagatcactagaacttaattctcctatctagctgtaatttcgtatcctttagcaaatttctcctgtccccacttcccccctacccttcttaggctctagtatcctctgttctcctttttacttctataagctcagtttttttagcttccacctatgagtgagaacatgtggtgtttaactttctgttcctatcatatttcacttaatgtcctccaattccatccatgttgttgggaatgacaagattctattttttttaaatggctgaattgtattccattatgtatatataccacatttttttgtatcccttcatttgttgttggacgcctatgttgattttctttattcatctgtgtgggacacctaggttgactgcgtatcttgggtattatgaatagtgctgcaagaaccttggggttgcagatgtgtctctgatacactgatttcctttcctttggataaatgcccagtggcgggattgctgggtcatgtggtggttttatttgtagtttttttaaggaaccttcatattgttgtctataatggcatattcccaccgagtgtctaacagttctcttatctctgcacctcactggcatttgttatttttttgtcttcttgatactaactatcctaactggggtgagataatacctcattgtggtttggtttgcattttcctgggcagcttttttatagacaatcaggagactgaacagaggtgatcgcaatacctttttaggtctctgataaggcacagctgcatgaggcatgagtgcagcctgttaattttttattttagggaaaagatccactcactgtaggctgtttcacactctcctagaaaaagaaaaaaacaaaaaaccaaaacatcatccaagcaaagaacttggcgcttggtttatctctgtctcttttcccacttaacatctcacacaatgtgtctagcttctacgctggagtctgctgtccagggttgagaaattcatgtggacctgaagatgctcattggcagccaggccattataaaatgaagatggactcgaccagggagaatgtagtaggcattcagcccaccacccagagggaggctggtgctacccttgccaggatgtgaatgggacgccatgagcttgttctctatggagttgttcccagaccctaacagatcagaaaattgaagcaaaactgagcgatcagcaaaaaggccaccatctttgtagtacgtcatatgtcaggtgacaacatcttagatgccatttgtcatcctcatccttcttaaaggagacaagaagtcgttgccctcaacccctaagaaggggcaactgtgaaaggccaaataatcagaataaaggatagcctctcacattacatacttttggattcatttaaaaaaattccctacatggttcttgtttttctcatgtcactcaagaattgggaaccacagccctggacttgtctgggtttaggtgcctgcagtggagaccccagttccagagtcaatcagtgaaccacaaagtaccactttcaaattgcttttcacacacctccttgtactaatttcctattgctgctgtgacgaattgccacaaactcgggctaagatacgagattcagcgtcctaaagtgtaggtgtcagtggcccatgctcccacggggctgtgggggagtctgcgcttcctcaccgcttccagcttccagaggccactgtgttcctcggcttgttttgcctctttcttgcatctctttgacctcctctgcttctgactctgaccctcccgtcttcctcttataaggacctttgtgattacattgggcccacctggattgatccaggattaacgctcatctcaagatcctaattttttctttttgtttttgagacggagtctcgctctgttgcccaggctggagtgcagtggtgcgatcacggctcattgcaacctctgcctcctgggttcaagcgattctcttgcctcagcctcccgagtagctgggattacaggtgcgcaccaccacgcccggctatttttcttgtaattttagtagagacggggttttgccttgatagctaggctggtctcgaactcctggcctcaagtgatctgcctgcctcagcctcccaaaagtaatccccccaaagtgttgagattacaggcatgagctgccacacccggccaagatgctgaatttcatcaccctcgcagtgcccctgtggccgtgaaagcttttggagtcgtctttggagggctgttactctatctgcatccttccgctcctctctcctactcccttgtcaaatacccttgcaaggctggcttttaatttgtcttcatatatgggattatttaatcattagtcctaaaatgaacaaagggctaggggctgggcatctggggttgtgatcttgactgggttgcatgatttggggccatgtgcataacccctgaggctcttttttttcttacctacaaaatcatgggttgtctggctcatttcacagttaaatgtgaagtttccatatccatgtatgagatttcaatcactgctttccactgtctgctttagggattggggagtagggtatttagaggtgaaacaggaagaaaggaattatgtgtatgtgctttacaaattcacaggtgcttgaatgtatttacccttgatgtgctcattttatttcatttctatgatttttgacgtgtttatttttcccacgtctagaacagaataggtgtgctggcagggatgctgttaggaactgtgatagatgtatttatggttcctgaaggtttacgaatacggtcatgctgagctggggaagtccagcctctgccctgggcttccttcacctgatgcagttatttcttgttaaagattcactgtaaaatgccaaataaacttaataactaactaataaccatctttgtcagttgaggacacttacattttatgaattttggggaaaatataggaagatacctgaggaaatagaattttcaatatcataggtctagcttttgatattacagaatttttgtgcacatgtggcaatgtgcttgctttggctttctaaaaagaattcaggtagcggtagacatcttgatagcagtaaaaaaaatacaaccaaaaggaaggccttcaccgttacctgagtgttcaccatggaccccattgtgccagatccaacaggggcatcattttctctaagacacaaaacacacacgcaattctacgaggtcagtatccggtccttattttggccattgaaaacctgaagatagagcagatcgtttgccagagggcaggcacccaggggctcggggaggggtgctgccctacccactttagctgtctgtagagaccatgaacgtgaacaccaggaggctgcgtgcgcctgaaattctggactttacagcctgaggtgcagctcaggcagctcaggtttatggaggccattccttgtacggctaagcaccttcctgtccttggaggtgtgggcaggaaatgttgaaaggtgggtggctctgccctctggtggcttttctttagttggggatgtcttaacacacacatctgaaataagactggctcatgcagaacaagagatgggaagctttgcgtggtgccagggctgtttggaggagcggagttaaaagatcaaacacagacttgggtctggctttcgtgatgaggtgcacccagtgggaaggcccagctggcgagggagaagttggtacccaaagatgtgggctggactggcttctttccttcagtagaagcaagggcccagggaagggagtgtgtggtgggaaggtacggtggcccgtgcttgccagaggagtttgcacatgacatggtttaattttagagaattttagaggtgtgccacaatgcaggtgccttttgtgcatagcctcgcctggctgggctgtgcaggatggatggatgagagctttgatccgcgattttgaagatgagttttatattgaatgctatatcctattaggtagaggctgttgggtaggaggaacattaatatatatttttttaaattgagagtgggctagttgaatactttttgggccttaaacactttgtagcatcctttttacacctgtgactgctgcctttattccataatgcatgagcaaaagtgtggttggaatttaatggtgtgactttttaggggcttatgtaggagcactatgatccttttgcaaaataggagcagctttatgtcaggataaacatgggatttcagacatttcttgcttatcattgtcagttttaaggatttcttctaacacaggacatatttttgtctactgtgattgtaaaatctattggcttaatatcaacattgctatatgataatttttttattaatttggtttccaaagaatattcactccatgtgcaattgattcataggcagataaaaatctattagtggaaataaaagatagtattgaagtgtcaatcaaaatactgttaacaatgtcttcttatgtcacttatggtcatctggtgtcatgggtagttatgaatttctcctccttaaactattgaccctttatatttgtctgaaagaaaaggtcacttctgtgggtatcagagaggatgatgcaggcagcgactgaatgtatttcaatattaaaaacaacaacattaaaacaagccaacacgactcagcatggtcacttctatctttactattactaatatatttccccttttttcatcacagctttttataactatgatgccagaggagcggatgaactttctttacagatcggagacactgtgcacatcttagaaacatatgaaggtgcgtatgcatcttggtatcttttctcttacattttgggcagatggcacaccttctcagtgcctgctgggcaaagcattcctctgttacagacacataagacagtcatgcttccttctcaggctcccttttcttgcagatggatactgtttcaggtaagggtagtagtgaggctgttgtttaatactttctgaaggtgaacttaaaactgaaattcccatttttaaactccttggctccttattttcaagcatgtgtaaatcttttttttttttttccttttgagacagagtcttgctctgtcgcacaggctggagtgaggtggtgtaatctcagctcactgcaacctctgcctcccaggtacaagtgactctcatgctttagcctcccgagtagctgggattacaggtgcccgccaccatgcctggcaaatttttttgtatttttagtagagactgcatttcaccctgttggtcaggctggtctcgaactcctgacctcaaatgatctgcccacctcagcctcccaaagtactgggattacaggtgtggtccactctgcctggccaagtgtgtataaatcttgattgttaacagttgaccacttgataaaaaataggtttaagatagtttacttcgttgttttgagacagggtcttgctccatcgtgcaggttggagtgcagtggcacaatcagagctcaccgcaggcagcctccccatcttgggctcaagcagtcttgccacctcaggctcccaagtagctgggactacaggtgcatgctgccacactcagctaattatttatattttttgtagagacaggatttcaccatgttgcccaggctggtcctgaactcctgagctcaagtgatttgcctgcctcagcctctcagaatgctggaattacaggcgtgagccactgtgcctagcctgcttcattgttttgatgtgtttgatgtgaactaagatttcttcttttaatgtcctcacttagatttgttagcagtatatgtctcagaggaaccccaattttcatcctttcctttttttttaaacctgtaatccccattttcttgggatgaacagagatttatcatagttatatgggatgccgtccaatgaagcaatatttttttttgttttttttgagacggagttttgctcttgttgcccaggctggagtgcaatggcgcgattttggcccaccacagcctctgcctcccaggttcaagcgattctcctgcctcagcctcctgagtagctgggattacaggcatgtgtcactgtacccacctaattttgtatttttagtagtgacggggtttctccttgttggtcaggctggtcttgaactcccaacctcaggtgatttgcccgcctcggcctcccaaagtgctaggattacaggcatgagccaccgtgcccgtcctgaagcaattgttataattatccaataaataaactattggtgacagtggttttccaatgtccttggcttttcagacaatttgtttttatattttgtgtttgcaaataatttgagcatgccatatttcattttatgctgtggttattgttgcacagaagggaagaaatgatgggcttgattttttaaagactgttcagatctggaggttttggtgagattgtgttttcttattgttgtcggcttaatttcctgcttgaaagggtggttcccatatagcatatgaataaaaaggataatttcagtagaaaaactgctttttcacagaggttttttagcaaaacccttccacatgggaggttgggggtgagaggggaaattgaagacatcccgtagtaatcagcaaattgaacttccaacttgaaatccactttacaaggaatgaagtatgcccagcttcctgctcgaggcaaactgtgaccagctcctggtagactcctctgagaaacacagacctactaacagatccatgttcatggcccttatttccccatctgatgcatgctgtaccttccctaaaaaagtcctgtctgaaaaaaaaaatcgactttagtggcctctgcgtggaagccagtgcagctctgcaaaaaccagccccagtccttaagcggatgagtagttgtgatggggtcttctgcttgttttccgtgtttacagctgacagctgtgttcccttatctcctctcagtatatactgcatgtgtctgagaggagacagagagaaattaagtagaggttaaggatcaaaccgctcatctcagacacttttctgatttgaagggaaatgctcttgtatcttgttttacttttgctgccggtcagttgaagttgaaatcctggttaataaacactgggcaatgatgtcattcctgaatagttaatgatttcctgtggcccctgggcctgtggagactgcatttttgttctttgcttcataagaggaatgcgtgtgtggtggtggtttttttttttttgagatggaggctcgctctgtcgcccgggctggagtatggtggtgcaatttcagctcactgcaacctctgcctcctgggttcaagggattctcctgcctcagcatcctgagtacctgggattgcaggtgcccaccaccatgcccagctgaggaatgtgttttttaaacagtggactcctcgggcatgtcagtggtccttgtaatacgtgtaacttcaaaaatatctgattgcaggcatttgactttttggctgacatcatgataagagatctacagtgaacattaattttctgggctagtcattctttctagattctgatgaaaatatttcagtctttgtaaagactctttagcataaaatgaatttccgttccttgacaactaactttttggttttaatctgaatctaatcagagaaatgcatttggagaagtattaatagttttgactttggggagtgtggtgactttttgtcattaaataaaaagagaataatgtacttccatttgttttccaatatcttcctcttgttttatctaaatttcatggcttgtattagagtctggcattttctttttctttccttggctctccttttcctctaagatgactttttggtttagcaagtttgattttctttttttctatgatcctttccaggatattacagagcttgctccagaggctataatttctagatgataaatctttattttagggttcaaagactaaatttaccttcaagttgtggttaatttctctttcttgagctcacgaaggcttacagcatagaacaaagaaaatgagctttctagctcatggtggaagtggaaagagctttgagagctcattcgtgcagacccctgcctttaaacaatgtcctacctccagataggagaggtgaggccaggccccagtgttgattgagtgactcttgtctggtcaagggcgtgccaatcctgctgtcgactcgtttccatagggtccccagggcttccatagcgtccccagggtgagatgctgcaccagaggcaagctgcaggcattgcccaaagttgaggaaattgtccttttgattcagccacattcaaacttaatttattcaactctttaaaagggatagtgatgcattttcttctaaaatgactagaccgccattttcctgtgctggactgtgtcctccccgagtttgggacctgtgtcttgcctgtatttgcctgttccctgggtggatgtctctttttttggagcaggttggttgactacgtggaggccacttgcaagccgtgccagggagaagttaattctgtaacagctgtgaatctttctccttccagcctcatcccctctttgctgtgccccagagcagccaggtaatcgttccgttctgttctcttactctccggtgcaaaacctctgccgggacatcctctctccttcatgccgaactctgtcatgcagcagggtttgtggtgtgacccctacttgtcttagggcacttccagtttctgagctcatggaggacagagattgggtctaatctctttctgtatttgtggcacccagtgtggtctctggtacatggtgtgcgggctcactttgttgaagaaatagtgcatgccaaaaatcgtggggaggaaaaccatggttttcattttgcttaggaaggccattagaagaggaatcgactgcctatgaacattaaataaagacacaaaactccttgcctttcatgcctactgcttggcccttcctcctcctgcctcccatagaaaacctttctactgtgtgtgaagtggcctctcgtttgcctgtgttctcgtgctgtttggtgtgcatctgtttttaacagatgtaagtgtgtcattatagtcttgttctgttttttattttccctcgtgctccatttaaaatgcactgtgttctctgtgtccctttagtccatggctctaactgcatcgtgtgcacatttcatgttttactaactgcctgcctccccgggtatgagcacttaggttgtccccgcttcccaccacccaagatcaagctgccctgagcatcccatgtccatctcactctgcagggcacacagatgtctttgggctgcgttcccaggagggggttgctgggtcttgggtgtggagatgtagactttggataagcagggcctgcttctcccaggctggttgccgcagtggacactgccacccacggtgaccaggggcttcctgcatcctgcagtgttctgccttctaccactcttaactgtgtacttttcatttctctgactattattaaactgaagcatctcttcatacatgttgaggtcttatgggtttcttctatacatagtttataaactttgctcattttctttcttttcttttttttttttttgagatggagtcttgctctattgcccaggctggagtgcagtggcatgatctcagctcactgcaacctctgcctccctggttcaggtgattctcagcttcccgagtacctggtattacaggtgcacgccaccacgcccagccaatttttttttttttagtagagacggggttttgccatgttggccaggctagtcttggaactccagacctcaagttatctgccctcttcggctgcccaaaataccaggatgacaggagtaagccaccactcttggcctcattttcttactatacttagttgctgtctttttgtgtctctgtattatttccttatgtattctaagacgttaatctttgtcagtttcagaaaagaaaggacatattaatgttgaaaatgcaggaagactataataggataaaggacagttgttgaaactgagtacacagctttgcataactcattcaactgacctttctttttcctttttgatatatgagcactgtgtcatagatgggctttgatatatgagcactgtgtcatagatgggcgctgatactgggccagcttatcaaaaccactgaacttgacaatatggctatcaggagataatccttcaaatgtgtggctgaagtctaggcattttgtatctgaggttcccccaatcagtctgttgagtctccagtcaagagagtgaaatgagttcagttcatcataactgggtcttagcaaaacctttgccagagtcctggcagtttctgtcctcttttctggatatgcagaaaacagctggttagtcatcccttggggattctgctcatcttaacaccatcactttctggttcacaatcatccttttcatccctggttgtgaaaattttcaccttttgagagaggtggaggccagttgctgtgacaatggcccgttttcacatctgtctgatctttggttctgaggtttgcctttttaatagtgtaaagaaacccagtatttggttattctctgggaatttacccagctcacgttttccaagtgccctctgtcactctctgacagggtcctttgttcctatggggcagagttgggatttgtctttaagctttttttttttgagatagagtcttgctctctcatccaggctggagtgcagtggcatgatcttagctcactgcaacctctgcctctcgggtttaagcaattctcctgcctcagcctcctgagtagctgtgatcataggggcttaccaccatgcttggctaatttttgtattttttattagagatgggctttcaccatgttggccaggctggtcttgaactcctgacctcaagtgatccacctgccttggcctcccaaaatgccaggattataggcgtgagccactgtgcctggcctctttgagcttttgattagctttccagaaactagatggcctggagtgacttcagaatgtttgggagtaaaaaatcatccatctgaactcacaaatggtggggtgcttggaggctggatactgacggtagacccctaggcctttgcaggggcagttcctgtcctcagcctgagaggggtgccaggggtgtggctgggtctggtcccttgttgaagggactcttctgtgtggcatccatggcatgcggatggttcgagtgtgtctttctttctgctctcactattttctttctctcgccacttggaaggagcgagaagtggagcctgggccaaacccaaagggcaggtgtgtcctgtgcttggccctggagcttcctgtgggttgagggctgtattgttgctacagaagtactttgtgaggtcgtggctgctccaggaaaaagtgccctgtcttgaagtgggaggaagttctctctcaatgggttttctgttttggggcagcgagatgctgacatgtgcccttggagagatcttggtctaaatcaggcagagggagagtgaagaaaatgcatacacaaggagcctactcagggccagtggttgaaaggacaagtcctgctcttggaactgtgcatctgaacttcaaactgctgcttccgaaccacatgagatgacggaggtgaaggtatggaggcccatgtgtgaaggttgccagctgggctccgggtgcgctgttgaaatgctctctgggaaaccacgtagtatatctccaaagccttaggttcactgaaaaatgctggtgacaaactgacctcactggttctgccaaacagtgagttctacacatcatgaatgtattgtgaggaccctaacatgtctctttgtactaactgtttcaactttgtgtttgtttagggtggtaccgaggttacacgttacgaaaaaagtctaagaaggtaagtccttcttcttaaacacagtgcatgtctcttcataaatcacaccttgagaggaaatcaattccatctcatttgtgtctgagggttttacttctatatctctttctctgaatttaaaaaaatatatgggtaggaatgtgaacgagcttggattgttttcttctgaacaatatgtgtacatagaaattgtagcttcatctccgtgagtgaattgctagtttgtgatatagtgttggcctgttgtcttctgttcatgaattttgtgtcctttttaggtctgtgtgtgtcagagaatgatccgagtaaagcgacttcaggaaaaaaattatttctcacagttgtcaatcttatgttgtccttaataatagattagcaaatttgcaagctcatgcatgctgtttccctcttgcatataactgtttttactctgcctaagtcaagctgtgaaaaaaggagttctgctctcctagagcagtttgcatgagtggttgtttgaatttctgaaactaagacatgtaattacacctcggatcattgtggtgggcactcccatacacaattctgttgtggctttaacattcttagcttcatggaacctaattatggctcttctgtttcattctacgatgttaagattttgaagtaacctctattctaagctgtggttgggctgtccacgttacccaatatgttttaatatctaattatgtttgacccgatgtgttttaatatctaattatgtttgacggatggttcattttacttttgtgtcctaaatttacctctcattatctccttattgggctggactctggattgtggtcctgagcctgtaataagtcctccaaagtctagtggcccaagtgccagggtccttccactctgccttccccagagcccctaacccaggctttgctgagcaggtcagaatgggtcatcctctcgcaacaccagcacttgggaaggatccagggtggtccctatggcagccatcctctggcacagtcatgtctaatgtgagagacagtgttaggaaatcagtgagccagatctgcaaattgggaccaggacctcttacctccaccttgccaacctcagactgggctacaggtctctacacatcagtgacctatagccttgaagtttgcacaagatcgatttcaatccagtggatggtggaatagatttctccaaggaaagttctattttcacattggttttcccttccccaatcaagagtgaattccagccaggcccaaagatatgcacctgtaggcccagctacttgagagactgaagtgggaggattgcttgagctcaggagattgagaccagcctctgctggtcataatgagtgagatctatccctaaaaaaatagtgtgtatctgcagatgaagctctgaatttaggaaagctgcagttgaaacctttagtaataagagattaagatcatggactaatatgcccctcccccatcacattcctacataggacacaactgccacatcctgggctggatgtgccccaggcaagctgttcctttttctttgaatcttacttggtatttgttatcaccttccccaatttgagatctcttccattcccacaatgcctcctgaaaccacagtatttctgcactacacctgggcacctagacatcataactcattcataactcatcaacacagtagcgctgggtagggcatagctatttttccatctaagatctccactggtagatgaataaatccaagctttacagagattataaatttgtaaggggcctcctaggcagtagcagaaaagggatgtgggccctaggaatcctggcaccacgtgtctgtaaacaactttcctgtagttataagtgtgcagttgattggggtggtgctgagcaggcccagcggaagttgcgcatttcaaacctgcaggtgtgtccagcctcactcagtcattatccttcctgtggcttcatgattctccagtgggtttgctgagattgagggttgtctccacctgtggacatggacaagactgggactggttttttgtttttctcccccatctgggtggacacctattgctatcatggaaagaaacccaggagggtgtacctgggatttggaggtgtcccggataaccaggacctgaacacagcaacccagcgttgggtcccttcagacttctgttttttttaagttaatgttttatttttttggagacagggtctcactttgtggctcagactgagtgcggtggcacgatcatagatcactgccaccgcgacttcctgggctcaaggtattctcctccctcagcctcccaagtagctgggactacaggtgcacaccaccatgcctaactaatttgtaaaaaaaatttcggcagtgaaagggtctcaccatcttgccctggctgttggtgagctcctaggctcctaggctgaagtgatcctctcaccttggcttcccgaagtgccggttgcaggtgtgcacctctgagcctggcccagccttgtttgttgctcagcctctgactctctgcctgacgccttccctctctgtgataattcttctttatatggaatttggccactttccttgttggcagaagcaacatgaatcattggtgcctgctagaccagttcagccccctgcctgccccctgcccaccccctgcccttcccaaacttgattagtagcttgttttctgcatcattcagggctgaatgccggggaaacccatgcagaagcttccattcccacaacaggtgccttgaagccacaggggtgccactttatcaatttctgctgcatgcactaaatctcatgcaggaagcggtagctgggctgcgttgcactgcccaagaccccaaccccgttgcctcttttcttacctttgctttattccagtaagggagttattttgcttgctcagaaagcaggaccctacgtttttttttttttttttcctgaggcggagtctcgctctgtcgcccaggctggagcgcagtggcgggatctctgctcactgcaacctccacttcccgggttcaagcgattctcctgcctcagcctcctgagtagctgggactacaggtgcccgccaccacacccggctaatttttgtatttttagtagagatggggtttcaccatgttggccaggctggtcttgaactcctgacctcaggtgatccacacacctgagcctcccaaagtgctgggattacatcgtgcctggcctcggacccaaactcttgataaagctctttctggcacttcacagaatgtgcctgaggctgaatgtcctgttgagaaactctccccaggcttcattctcttgggctcacatgtgcattgcacttgagggaggccgaccagcttatcagcggaagctagggtgtacccccaggtgttgtgcagattgggcgaaattcggcctgtctttctgtattttaccagagggcccccctgttggggaagtctctgagaaagtctctgtgggtctgggtacgtggtcagtgcacaagggacaattggtggtgtaaaccaactttcatcattttgaaagaggagaccatcatcaaaaattgcttttgagacatcagttggcctttgttctgcctgcattgaggccaaaaaggtgtgatctatggagcagcctgcaaattgcctgtatctttgtggactttttcctttgcaagtgtgttgcctgtttgcttctaagacatcggcagactgcaatacaagccaaatgagttgccgtcttttctacttctttgtgttttctttgatatgttaagacttaaaaaattaagagcgatctagccacccctcaccccacctttttgggaactattgtttgatttacattcagcaatcctattgataataaaagctactgttttttttttcctcccaaagggtatatttcctgcttcatatattcatcttaaagaagcgatagttgaaggaaaagggtgagtctggtcttgatgtttaaatgaagaattgcaagtactatatttggccttgctgctcttttgtacgatggcgtaatatgagagggtcaagacaatgggtgtgattgactcctgggggacaggagttttggggagagaaaggggacttgtgattcagagttgtgtttaacatggcttttatcctttatggagtctgaagtcagcaccatacttggcagttactgtccttgaacctggggtcactattggaaagcattcgccctggtgctctgtgcttcctctgtgagctactgacttcatttggcagagactccaaagccccccagctctgagtccccttttttttgggaagacattgcaggctgtgatataaatggagtttagggtgaagcaacagttgttaaattgggacatgcaggagtttacattttgtctaattgtgatgtatgtttcctagaggtcataaaactgatgtataagatcattaaaaggacatttctagaacaggaacccattaggcaggaatggcagatgaataaccaggtgtgaacttggaagaaggaacattaaaatgttttctttttttgtctctgctacatcttcacactcagttaaatatgtaaattataaaattactaatcatatgattactgcataatgacatctctttggctgattacaaaattgcctttccaagcactgtacttttaacatatgaaaagaaccgttcgggttccatagttccatgatgcatacttaaaatgaagaaaataatttagaggcatgaatgatgatgacctgcaatatggtactttttagacagataaagtgttttgtatgcaaagttttaaagggaagaaaaagaaagttgagacttttactctgtggaagtaactggatcaagtgtgcatttagtgtactttatatctgcattagaatccttatacagggcagactgtgtatgattatttaaaaagcactttgatgtatacaaaagaatatatgtaaaatgtaattatgaagcatgataataaagtgaacaacaggttattctgagtctcaataagtagagtcacacctaaccagacaggcagacagagacacatttggttcctgttcctgggccttctggtccaaggtgccccactgtgggcaaatgcatagagctatggtgaaatgaacagtttagaaacaatttccctgcctttgctttgggttccctgtgattgttctccacactgttttcctggctctatctgtctcccttgccacggccactcaagcctagctgcccaacagctccttccctgaagaaccccggccttcaggcttgacaggtgatctcatccctcttcttttcctccaggttgttgtagacttccaccttcccttcttctcctggtcctttcccctttctagtgccaatgtgggccacgctttcatcccacctctgcctgccttcttgctctccaagtttattgtcctgtctctcttgcagagtctgtctctttcaggatctgtctcttgctggtctcttgcatgatcgttctcatatggcctctgtcttgcaggctgccttgtaagcctctctttcttgcatgagctctctcttgcatgatctgtctcttgcaggctctgtctttctcttgcaggctctgtctttcttttacaggctctgtctttctcttgcaaggctctctctcatgtgatctctctcacagtatcttgcttgcattgactctcgtgaaggatctcttttgctttgtctctcttctctctggacgctgacttcattcattctcagacatcccaaatgattactctatgcctgttaccactgattctgtacctattcccccataaccaaagcaattcccattttgtcctccatgcttttcccagtactgacatggttagcaatgcctccttatgtctggacctcacagtgtcttctcatcctctgcctctggagctccactgcagccttggacacgttggtccttgcttcactgaaagcccctcttaacgccgatgctcttatcctcttcttattatgctgacctactgctcaggcatgtcaccgtctcctctgtcctgtgtccgctactctgagggtgctgtcctagccttctcctatttctttgttgcccctccctgattgacatggcctctgttgcgtttccctcttcagctgatctgtctctgtgggtgatgctcacatcgggaccaccagccctgatttgtctcttgacccctcattcagttaggcagccaagtaactaatgagaatcatccccactgttgggtgagcatctgctatgtcccattcattctcttttcaaaaaaaattattattatttttattttgtattgtgtatttttattttatgagatggagtcttgctctgtcacccaggttgaagtgcagtggcgagatcttggctcactgcaacctctgcctccaggttcaagtgattctcctgccttagcctccccagtggctgggactacaggcattcaccaccatgcccagctaatttttgtgtgtgtgtgtgtgtgttttttttttttcagtagagatggggtttcaccatggtggccaggctggtcttgaacttctgaccttaagtgatctgcctgccttggcctcccaaagtgctgggattacagatgtgagccaccgcacccggccaaaaaattatttttagatttgacaaataaaaattgtatgtatttatggtgtgcaacatgatgttttgaagtatgtatacattgtgggatggctaaatcaaactatgtgtgcattaccttacatacttatcatttgtttgtagtgagaacacttaaaatctactctcagcaatttcgagtatacaatacatagctattgtagtcaccttggtgtaggataggaggcctgttgaacttattccttctgtctaacagaaactcggtgtccctttgacccatcatctccccactcccctatgtcccattcttttttttttttttttttttttttgagacgaagtcttgctctgtcgcccaggctggagtgcagtagcatgatctccgctcactgcaacctctgcctcctgcgttcaagcgattctcctgtctcagcctcccaagtagctgggattacaggcgcacgccaccatgcctggctaatttttgtatttttagtagagacagggtttcaccacgttggccaagctggctttgaacccctgacctcacgtgctctacccgctttagcctcccgaagtgttgtgattacaggcgtgagccaccgcgtggagccccattcattcttaaagatgctctgccttgatgcactttccctcagtcttaccagcagccctatgaggcaggcattattggggttacatattcttgaacactggcaggtaacaaggtggtaacaaaggtaagacaataaagccagatcaaatgtgttaatgccagctggcacattaatcccagggatccactgggcctaccagaagggaggaacctaaggtggaaccagaaccaacagcaggacatggtgcatgcactgaggccctattcacatggtggaagggaggtcgttgagctccaggcttctcatagccagtgtgaggagcaccagtgcactcaacccaggatccgtaagatgaaaacagcccagtcgttgttgcagatcctcatactgtgagtggaaggaaatttctccctgcagactttatagggatgacaccgtagcatgtaatgaaccgcatttccatcagcatccttactgggaaacttggggacatccttggcagggctgttttaatagtcatgttcttcagtagacactgatggtggcccatgaaagggtcattttgttgttgttgtttttgagatggtgtctcgctttgttgcccaggctggagtgcaatggtacaatcttggctcactgcaacttccgtctcccgggttcaagtgattctcctgcttcagcctcctgagtagctgggattacaggcccgcaccaccatgcccggctgattttttgtatttatttatttttagtagagacggggtttcaccatgttggccaggctggtctcgaactcctgatccacccacctcggcctcccaaagtgctgagattacaggcgtgagccaccacacccagcccaaagggtcattcttcatagcagttttctaggggatggttttgcctgcacccttccctctgatgtctggttctggaactatccatgagaccaccgttcttccagggtccccgttgtctgttgctttgggatcctcccctccactgtcaataagtcatcacaggcctgatctccaatcgtgagccagtcagggttccttccacaggtctgggctctgtgcacatcaagggttgtaggtgggaactattgtagcatccctcggcatcccatgctggccacattcttgcctgttcaggacacacagacaacctgtggggccagctagcctaactacaccagccacaaattcactctctccccctaaccctcagtagtctgagtcttacttagcatagtgcctgacccagagcacatgcccaggaagcagtggttgatttgatgaaaacgagcgcataaataggtaatgagttaagaataagtcaaggggctgggcgcggtggctcatgcctgtaatcccagcactttgggaggctgaggtgggagtatcacctgaagtcaggcgttcaagaccagcctggccaatatggtgaaacctcatctctactaaaaatacaaaaattagccgggcatggtggtgggcacctgtagtcccagctgcttgggaggctgaagcaggagaatcgcttgaacctgggaggcagagattgcagtgagccgagattgcaccactgcactccagcctgtgtgacagagcgagacaccgtttcaaaaaagaagagtaagtcaaaggttaaacttttggggcggaggaaaaaggataagaaagaggatacagagtttaatcagagttggcatcagatagagtaaccatggacatttggaagctgtaacctctctcatatttcgccaaggataactgcttcctgtattatcatgtaatgagttttatgcgtgatggaaaatgtaaaagtaatcttaacccaaacctgcattttaatgccacatggaccggctgtaatttatggcatctttaagatagatgggtacacatattatgaatatactttccttttgccagaccttgacattctgtagacttttaatggaatattatttgcctctttcatcttactttgacgtatgaggtggatggcttacgtgcagggtaatgtatgaaccttcccaagctctgtacaaatataacttgtcattcgtagagacgtatgtatttatatgtgtgcatgcagtcttatttgtagattttcttcccatttgcttaatactgaacgctatggcctagatgtgaaatttaccaggtactactcatagcaggcagtgaaaccgtggactcagctgctctttccttctttcctcccaggcaacatgaaacagtcatcccgggtgacctccccctcatccaggaagtcaccacgacactccgagagtggtccaccatctggaggcagctctacgtggtgagaaaatgagatattcattcaaagcttagaaatagagagtgggcttttttgaccctgatatgccaatgggatgtttttttttctcagcgaaacttaaaagcagagcttccgagacagagttttactcggaattggcaaaggaagcgacatggctgagagtttagcccctgctgggggctgtgtgcccttcgacctgccatgtatttgggtgtattacagtgagctgtagcagaagggactgtaggatgtgtctttccttgcattggaaggagaaatgtggttgtttcaggcccctggaatgcaggatcgggcagtgggtgttgatgtcaccttttaaacagtaataggtgcttatttaaggatccggtagagggcaattactatttttttttttttttttgccgttgtctgacagtaggtaatacctcttatcatttaagaaaaacaacagtcttctagatttacctgtgtttgtgacaggaatagggaaatattttacattctagcttcgtgtgcaattgtccagttctcctgatcacagaagaagtcttattaatgcagagaggttgaagctctgacatcttccatttcgtattccctcggggcatttctttgcacataaattcatatttgcagtagattaccttttgttaagcttgtatttctattcagagtgttgatttctcatatgctaatgttattaccaccaagccagggctctggaaggaagtcggtacgttcatttcttgagaacatagaaaacttcctaaagtcctgcagctgcttgttgggcaggcttgttgtttttgattatacagtggtttcctataaatgcacagtaataagcagttgcagtaattgtcatcaaacgtactgaaaaacctaaaagcgtaaagttagccatgaatgttttgtgtaaatctgagcaattctgtagtcagggtttcatcttcaacttagcaatttttaaacaaaaatatggcaacaaaacaaacaggagttgatgctcatagtcagtggacctacttaagtctgtaaccctagagtaggtattcttaatgagcaccttggtttccttttacaaaacttaaatttgcctctgatagacttacatggttggatttgtgcaaagaaagctaacccccaaaatggctataatatttttatatgggctgggcgcagtggcttatgcctgtaatcccagcacttagggaggccgaggcggatggatcacttgaggtgaggagtttgagaccagcccggccaacatggtgaaaccccgtccctactaaaaatacaaaaattagctgagcatggtggagcatgcctgtagtcccagctacttgggaagcttaggcaggagaattgcttgatcctggaaggcggaggttgcaatgagccaagattgcgccactgcactccagcctgagtaacagagcgagaccccttctcaaaaaaaaaaaaaaaatgcatttttttgctgcacattgtagatattagcaaaatagtaaggattttagatagttgatacagccttagagcagtggacaagagaaggcagcgtggatattagaaactcctagaaagaaggttaaataccagagtgagctcagtacgtggtttagatatgtagagggggagttttttaaaaaagtggcagtgaacaaatttaatgttttaaagggaccatgacatttagatacctttttatttatttattttttgagatagggtcttgctctgttgcccaggctagattgcagtggcatgatcacagctccctgcagtcttaacctcccaggctcaagcaatgctcccacctcagcctcctgagtagctgggactacacctgtgagccaccatgctcagctaatttttttaatttttgaagagatgaggtctccttatgttgcccaggctgatctccaactcctggactcaagcaatcctcccgcctctgcttcccaaagtgctaggattataggccggagctaccaaggccagcatgcttagagttttatcacattaggttccacctaaatttcttttcatggaaagaaccactgagttattttccttcagataatccctaatctccttgattattgtacgcttgtaattgcaagctgcaaactgttgcttttctttgaaccgtcaatcccatcaaaattcttagaaagtggtaagaagtgtgagttttgcatcttatttgcattttcctcttgtcacaaagcaccaagagcttgtagattgagatttggcctcttgcagaagtgtctcttgtgggttgtacacaccacagtgtgcagcagcccgcccagggtggaatgcttcttcttccctatagctgagctgagagcgaggccgaggagttcaggttctcagtgtgctgagaagggtccagggtgcagggtgttctgaagaccgtatgtaggttgtaggattcagatctttaggctcagactaattccggaggagctttagacttgcccatctctgatccagatgcaggaagctcacgagcaggtgttgacgctcaaggtctagcccctgttgggatcacctttttgcttcagtgggacacaggatgttggatgaagtcttggggattatgcattactttttgttcctttaatcttttaatgtcgcatggaaaccaaattccgtataatatgttttagtttatgctgaaagcaccttttaattcaacattaactaaatctcatgatctagtgcttatacctcatgcgtatttgaagagatagccattctctaccatctccacaatgctgttttataacaaaatctttctgattgggtttttccccgtatagcaagataacagggagatgtttcgaagtgtgcggcacatgatctatgaccttattgaatggcgatcacaaattctttctggaactctgcctcaggatgaactcaaagaactgaagaagaaggtcacagccaaaattgattatggaaacaggtttgtttatttgaaagatgattttacgcttaaattatccaatgtaataacatcactataagtcttcaggagaccaagatcatattttatcataaaacaaaatttctaccatcaaagtaatggcatgtttttcattttgaaaaggatgaggtattttccactggattctgaactggggaattttgtgagccattcttgaaaccttgtcattcttcaagggatagagtcaagaagccagggagcctgtcattttcaccgttctggagggaaccccatcattactcccctagcaaggaacttttactttctgaccatagtttttgactttgagtccagatctggggggccttgcatagtgacaagcaacaggtttctttctgtggaatcccaggttctgagcattggagtggacattagatcactggaaagtttgtcacctgtgtaggcttgccagttttcacaaacagaaatacagcccagttaaatttcactgcagataaacaacaaatagttgctttgtgcagttatgtctcttgccagagcaagagttcttcccatccatagcaggcatccccccagctctgcatgagtgcctttagtgctcacccctgcctacagctgtaccttctatgttagcacgtgttttttgatgctgaaagcaaacaagctgctctgatcctaattctgctgggtcctgtaactagaatgaggccatgcccttttccacctggtaatatttagttttcatagaatagcagagctgcaagaagccttaaaaagtatctggtcacatggttcccaaatgctcttctatttcagaatcactgggatagctgttgaattatagaatcccaagacctaccccttaaggctctgatttgtgatatctgggatgctggctggaaatctccagtgttttttttttgtttgtttgtttttttttgagatggagtttcggccttgttgcccagactgtagtgcaatggcatgatcttggcccattgcaatccccgtctcctgggttcaagtgattctcctgcttcagcctcccgaatagctgggattataggcatgcaccaccatgcctggctaattttgtatttttagtagagatggggtttttccatgttggtcaggctgatctcaaactccctacctcaggtgatccacccgccttggcatcacaaagtgccaggattacatgcgagagccactgctcccagccggaaatctcaagttttaaaaatagagttgggttgtgctggacagcagatttggaaaacttctggtttaattcaaccccctcattttacacattggaatgtggaagtcagaaaagggaaggggtttgcttccagccattcagcagaaaggagtccgggtaaatcaaggaacctttctgtaaaatcagaattatcacataattttctggtaatttatattttgaagtgtgaaaaacttcttaaagcaacgttatgagcaagatgtagggtttggattagaaatgctgtaggagagatttttatttttttttccagaaagcctgagatattagctattgttgcagcaaaacccatttcaagaccacctgcttaaaaaagcagacttttggagctttgatttgattttctattggagtatcataatttaaacttatgttcagagaccacctgcttaatttggctgcaggaagctagcaaagtacattgtatcatggaaaaatctagttaaggaaggaagtgtttccaaatacagtttactactttgataggaaatacagtccttaataagacaggttttttgcccaaggatctccaggctcttccataatttctccaaagcccagcgctctgcatatatcttcctagttcttccttcagaaaacctaaatgatgcaaaatgataccacagtgttgaatgtttgattttaaggtgggtggatttaataaggaaaagatgttttgcgtctttttcattgatcgcttaggcattcttgcttttttgattgatttttaacctgggtggaggggtttgaggagctgtttgagaatgtgatgaaggtcttggaccatatctctagaaaaatgtacatacacaatacacaaacacaggcacacagacccccccaacacagacacacacacacacacacacacacacagacagacacagacacacacacacagacacacacacacacacagttctacacatgatttcaggtggggaggtctcccaccctgtcctcatagatgcattgggcttccatggacttcatctctccattgccttgctgtgataagttgcaccttcataatggaaactcactctgattcagaaccagctgaacactggttgctgagaacaatgcgtagaagggttgactgcacaggccacttcgtttgatggtttgcatgtggcattctggaaggagcatggctctgccattggagagttctgatacagaacccaggatctggttttggaataaataacttctccaagcttaggtttcctcctttgtgcaatgggtctgacggtctgccctggcaggtgtgaggtgatgatgtggcaggacgtgcacagcaggctggcacagggccgtcctctcgtgtgttccctgagggaacccaattctgcgtggcctgtaggacctactggctgggcctcctaagctggttctttgtagctgccctggcaccagcactgacgtgcccataccagaactgatcatgcctacactagaagtgaccatgccctacccacagtagtactgactctatccacgcattactgacccctgcccataccagtattgaccccacccacaccagcacaaaccatgcccacaccgtcactgaccctgcctgtaccagcacgttcctaggggccggttcagggataggataaggagtagtatttgggagggaggagcttgctttgttagtgagacatattacaaaaataactaatgagaccttaaaatgctttttacattttctccagatgtctttctgttggtcttgaggcaccctgcttacattgcagccactgcggctgttttcatgcagtgcaaaaagcctctatttgtttaaagtctgtttaccctgatgctgttgacaggcccagttggtcctcctgcttcactgtcagtggaatttgctcaatagatattaaaaggaaaaaatcagttttctgtatttgtcttcccagtggtacagtgcttgagcaaaactccaaagactaaatatgtttgagatgctggcagactcgtatctggctttaaggtgtgtgacctcaagactcgaagtctcagggtagttttttagatggaacatttattggcaattcaactttcctctttaatttgtaactataaagatgttctctaattgaaatttatcattctttcaaatgactctgtttcctttttcatattgttaaaaaagcctgtttccatcggcttgttaattacaggaatataatcctaacgggtaagaggcacctatggttaattttctgcccttagacctgcgtgttttgttaacaagaaagccagaacctactgccagatcacaactcttgatctcttttgttacacagttgtctgtgttctttaaataaaaactgtggtaaaaatcatcttacaattttgttggatttgaggaatcagagagaatattccccaaaatatgtactgtttatttatttatttatttatttatttttagtatttattgatcattcttgggtgtttctccgagagggggatttggcagggtcataggacaatagtggagggaaggtcagcagataaacatgtgaacaaaggtctctggttttcctaggcagaggaccctgcggccttccgcagtgtttgtgtccctgggtacttgagattagggagtggtggtgactcttaaggagcatgctgccttcaagcatctgtttaacaaagcacatcttgcaccgcccttaatccgtttaaccctgagtggacacagcacatgtttcagagagcacggggttgggggtaacgtcatagattaacagcatcccaaggcagaagaatttttcttaatacagaacaaaatggagtctcccatgtctacttctttctacacagacacagtaacaatctgatctctctttcttttccccacatttcccccttttctattcgacaaaaccgccatcgtcatcatggcccgttctcaatgagctgttgcgtacacctcccagacggggtggccaccaggcagaggggctcctcacttcccagacggggcggccgggcagaggcgccccccacctcccgaacggggtggctgccgggtggaggggctcctcacttctcagatggggcggcccgtcagagacgctcctcacctcccagacggggtggcggcggggcagagacactcctcagttcccagacggggtcgtggctgggcagaggcgctcttcacatctcagacggggcggcagggcagaggcgctccccagatcccagacgatgggcggccgggcagagacgctcctcacttctagacgggatgacggccgggaagaggcgctcctcacttcccagactgggtggccgggcagacacgctcctcacttcccagacggggtggcggccgggcagaggctgcaatctcggcactttgggaggccaaggcaggtggctgggaggtggaggttgtagcgagccgagatcatgccactgcactccagcctgggcaacactgagcactgggtgagcaagactctgtctgcaatcccagcacctcgggaggctgaggctggcagatcactcacggtcaggagctggagaccagccgggccaacccggtgaaaccccgtctccatcaaaaaatacgaaaaccagtcaggtgtggcggcgcgcgcctgcaatcccaggcactccgcaggctgaggcaggagaatcaggcagggaggctgcagtgagccgagatggcggcagtacagtccagccttggctcggcatcagaggcagaccgtggagagagagggagagggagaccgtggagagggagagggagaccgtggagagggagagggagagggagaatgtactgttatagactggacagatttattagccagatgttgcttgtgtttttagttggtgactacatttagccatctggccaggaagttgcttaaccttattgtagataacgtccatatgtttggtgttcacatacaatagaacatctgtattgaaaatcttcctgtggcctcatgtaaggactcgaagtagaaggggagacatgcagggatccctattggggtcagtggggagtaaaaaggtggtggatagatctctcctccaagttttcttccctctctccttcctcaactctctgatgatgtcacaactgccagctatgtgtttgggttgatggatgtatatgtgattgcatatatatgtgaatgtgtgtgtgtgtgtacatatgtagtatgccttaggtggggtgcagtggctcacgcctgtaatcccagcactttgggaggctgaggtgggcagatcacctgaggtcaggagttgagaccagcctggctaacatggcaaaacctcatctctactaaaaatacaaaaattagccgggtgtggtggcacacacctgtaaccccagctactcgggaggctgaggcaggagaattgcttgaacccgggagatggaggttgcagtgagccgagatcgcaccactgcactccagtatgggcaacaagaacgagactgtctcaaaaaaaaaaaaaaaaaaaaaaaaagtatgccttaaaacttttcatattttacataataattagtaatacatacttcacttgggccttgtagatctgtaaaacttctccttgcaagacaaagccactgttgattgcaatggaaataaaaattgaggatttttttttttttttttttttttacttctcccaagatgacacattttaagctaaagaaagcagcctccaagaattttatattcctaatattttgggcaagcccgagtttctaggttgtttttacctgcccagttgctgtggtggaagttgtgctagaaaattcagcctccttggtctatgtctgtgaacttactaaattcttgttgttctagaattctagatttggacctggtggttagagatgaagatgggaatattttggatccagaattaactagcacgattagtctcttcagagctcatgaaatagcttctaaacaagtggaggaaaggttacaagaggaaaaagtaagtttgactctgtcatatgccattcacgttttctcagtaataagttttcaacattagtaaagtatcagtcaagcccaaaattgtcactaagaaagaacctgaaaaggagtagctgcagagtttgtgtcctacagtcatgagtggaatggagcctggtggcacaggatgtcacccatgacatgaaagggggtcggacagcattgtgtttcatcgtaggagacaggatcctaatgatgttgattttgtgttctcatctgtcaaatgagacacaagacttgattctgcatttcctctcggataatggtaggcaggtcatgtattccaagctcattgagggcagagagtacatgtcttattgtcttttcgtcttctatgatctttaatggtatcatgtatgcattagcctgttctcgccttactataaagaagtgcctgagactgggtaatttataaagaaaagaggtttaattggttcatggttctgcagactgtataggaaggatagtggcttctgcttctggggaggcctcaggaatcttataattatggtggaaggcgaagtgggagccaacacttcacatggctagagcaggaggaagagagagggtgtgcgggggggtgctacacgctacacttttaaacgacgagatcttgtgagagctcaccatcatgaggacagcactgagaggatggtgctaaaccattcatgaaaaatccaccccatgatccagtcacctcccaccagtatatatatatacacacacacacagtagatactcagaaattgactaattgaatcatctgttaattcaacaagtacttactgagcatctactgtgtaccaaatgttgaagacataatgatacatgagacagatgtccttggagggtttagtctaatgagggaacaaaaaattaaataactacacatatataatcattattttgatttattggatggacacctgaaagttttgtatctctgaaaatactcagcacagcagttgcacaggatacaattttttgtctgttgtgtgaatgcatgatttaagaatgtgcaggggagataagaaagtgactgcaccaaggcctttgctgggttatgccaatgagttattacaattttctattctgtagggaataaagaaagcaagtgtcagtgatgagtgttgctggggttgactttctgtttccttccatacacagtctcaaaagcagaacatagatattaacagacaagccaagtttgctgcaaccccttctctggccttgtttgtgaacctcaaaaatgtggtttgtaaaataggagaagatgctgaagtcctcatgtctctatatgaccctgtggagtccaaattcatcaggtgggtgacatttcttggctgccgtctttcctctttggttagtgttaggaacttgggatcagaaccactgaagcgtcccattcatgctgagaggccttggatgaatggctgctggacacgagcaagcagccgagtcaagagctgtcttagacagtgtgatggcagccaggttgggctctgggtcagggtgaaccttcttgcgtgtagattgctatttgctcgtagagttatagcagttgcaggtacactctggccgtatcttaagagtgtagctgaagattgaagtaatactttgtttcctaagttgtcttcgtaagattttatatatcctggtccctcaaatatcactatttccatttttcaaaatttggtttctatgaatgccatttctgtgagttttgtcttgttttttctgcaagatgattggctggaatacatcatttagaatggtgcctgccacatacagactgtcagttaatatttgttaaatgaaaacactgtaagtctattttttcctgcttagccttcagtataactttctctttgcccagatggaaacaatgtggttcaactatgtatgaattatgtgtgtgtctgtgtatatgttaaaactctagtatcttcacttgtattattcaaaatttgaaaacttagtgtatgaatgatacagaaaaatacgagtggattttattctcacttctgataaagactttgtttcctcttgacataggatgcagtttttattttacaatgtatttggtttgtcataggttttgaaataaacatgcattgtgctgaattttatagtattgtcattctaaatgaacaaataggctcttaaaaaaaaaaccaacttagaaataccatttgcaagtagttctattacagtgacaacccaagacattgcacattaaaacttggcaaggtttttgtgctgtggatgttaattgatgagtagctgtatgtgatacttttgatatttataaactcaatagttgtctgtatagtgcacgtacatggtattaattatgaagcaatgtggatgtacatttggtaccctgttatttggaaaattaacttgcttttatttctccatttttcaagtgagaactacctggttcgctggtccagttcaggattacctaaagacatagacagattacataatttgcgagccgtgtttactgtaagtgcacccaaagatgcttagttgaattggctaccattctaaggactacttttagccatttctgtctgccttcctgcgacactagaacatgggtccctgggatgcctgtatacaggttaatttagtattactaagtagagcgcatttccagaaatcatctgagtctctagccacccttagaatcaccgtgacaaagatttaccccattaacatggaatgtgcctcttaaatgtgtatcgtttttatttttttccttgagacggagtcttgctctgtcacccaggctggaatgcaatggcgtgatctcggctcactgcaacctacgcctcctgggttcaagcagttctcctgcctcagctcccgagtagctgggattacaggcatgcaccaccacaccttgctaattttttgtatttttagtagagatggggtttccccatgttggccaggctgctctcaaactcctgacctcgtgatccaccctcctcggccttccaaagtgctgggattacaggtgtgaggcactgcccctagcccttaaatgtgtatcttaagctcacttaacagtaattgactattgttattaaattcctttttgtcatatgaataactgattaaaatgataaaaactggtctgagaagagtctcaatccatttttttactgtccttttcattggagcttgcattgaataatgggtctccaaaataatttatggaaactaatatttctaggacctcggaagcaaagacctgaaaagggagaaaatcagttttgtctgtcagattgttcgcgtgggtcgcatggagctgagggacaacaacaccaggaaactgacctcggggttgcggcgaccttttggagtggctggtaatctatttctctgtgtttccttgagagtttcagatcttcacagtcactttcaaaagaatcactgttgaatgttgattggacaatgcacagctgtgatttataagcttttctgctggagagaaaaaatatatttattagttattttcattgtggcttcaagttgacctgctaggctcaggatgctctagtcctcaagtttcagatataaatcatatatttggttttaaagtggatcccatctttccctgggagtgatcctgacccatattctcagtctgtagggaagccagtcagtggaggttttcaggtcttggtgatggacataagaatggatatgtgcaggacggtcaaagcaacgaagaagaggaagaaaggcaaactgtgaagagaacgcggttagcttcatgttggtgctcttcatccgccatgttggtgctgtttctccgccatgttggtgttcttcctccgccatgttggtgttcttcctccgccatgttggtgcttttcctctgccatgttggtgctctttctccgccatgttggtgctcttcctccgccatgttggtgctctttatctgccatgttggtgctcttcctccaccgtgctggtgctcttcctccaccctgctgttgctctgttatttttggtgacagcacgaggaatgtgaaagaccaattatctctgttgaggaaagataaaggcatacccaggaagttctgattatttgccctagttcactgtgactctcatttttcatagttttgggaagtggttttctctcttttatggttgcagtacaatttcattacctagcactgtgatatttattttaatttttgtgatttttgggattcatatggatatttatgagggaaaagttcctgattcttgacacatagctggatttttttgtatgaacagctatggaagacattctttcccttggctaccaggaaactctgaacttagtccatcccccctgccttttaaataaacattatttttagaagagttttaggttcaagcaaaattgaacagaaaatacagacagttcctatatatttctccttccttccccctgcctccccattatcagtatccaccatagattggtacattgattacagttggtgaaccgcattgacacatcgtcgccctgtgaagtctgtagtttacattagcgttcattcttgatgttgtgccttctgtgggtttcgacaaatgaataataccgtatattcaccattgtagtctctcactgggtagcttcaccatcctaaaagtcctctgtgctccgcctggaatttttggaaaaatatttcaaatcatttaaataaatgacttactacatcataaggagtaagcaatagcagcgatatagacattatgagagcagcatattaattcaatttacttgaattcaatttacccatagagctaactaacggagtgttccaatgattttaccatttgtgagtgaaaatggtgagggtgaggtgttctttctgaagtccccacagccttgggctggggaaatccttttgcattttcatctttctgtctttttgtttttatgagacagagtctaactctgtcacccaggctgtgtgatgacagctcactgctgccccgacctcctgggctcaagtgatcctcctgcctcagcctcctgagtaactgggaccacaggcacatgccgtgctaacattttcatgtcatgacttgaatacatacttgaaaattgcccctctatttgtcagagcctgtagcatcttttacatgtaatctagtgttatatttaaaatgcctttcattttccaggattgttttttttcttttccaccttgatggtagttttaagaaaatatttaatttttgtctcaggcataattggcttcatttgagcaatcagagacatctttgacaacacacggaagtcgctcctcttttcaacagcagagctacacattctctggttattagattacaagatggattgtgtcataagttcctacgaatgcgtagttatatttcttaaagatgaaatgtagaccacaggctgacagtttttaccttcttttgattaaaatttttggaatttaaaaatttggaatatttttcagttttcattgggttgatattccaggaaagtctaggtactaatggatggagagggtgatgggcatgggctcagctgacaccactgtggccttccactgtttcttacatgctcacttatgcttgcttggtggggtctagagttaggttgggccccccagctcctggagttctccatgaattacagaagcctgggttattcactggggcagggcgggcagcctggacatagttccttgtttctggagcccctacctgtgtagtgttggctgagacactacatctggtccctggagtttggatgcctggctgtgtggcctccagggacttctgtcccctgatatctgctgatcacatggacaccccctttggtccctggttcctcctgtctggactggtctctggttccttcccttcctgtcttgtgtctctggtacccactgatatcggggcttctgaaaacccacctggggccaagttctagccttgtcgtcttgctcgtgaattttccagagtgtggcttctcctcactgctctgctctgactggcacatggggtgtcccccctcacttaggggttgcaaagaacctgtgtgaacctgcatgaacctgtgtgaacctctataaacctgtgtgaacctgcgtgaacctttatgaacctgtgtgaacctgtgtgaacccacgtgaacctttatgaacctctgaacctgcatgaacctgtgtgaaactgcgtgaacctgtgtgaacctctaagaacatgtgtgaacctgcatgaacctgcgtgaacctgtgtgaacctttatgaacctgtgtgaacccacgtgaacctttttgaacctgtatgaacctgcgtgaacctgtgtgaacctgcgtgaacctgtgtaacctttatgaacctgtgtgaacctgtgtgaacctgcatgaacctgcgtgaacctgtgtgaacctgtgtgaagtgcttcagagatacccataggcatttgttttcctctgtgggaagatttcaggcctgcagctgttaatgttgggttgccgggtcctttgagttctctgtcccttctggtgtcacagttgcctagcagttgctggtttgcctggctccactacatgccctgggtggggatgtcctgttcatcccttggtgccaagcactgagcactgagcctttgtggcctctgtgctcactccagaggggccagccttcctagccctgctcagctggtgtgtgtctgtacattataagtaagaaactggctgggcgctgcctgtaatcccagcactgtgggaagttgaggtgggcagatcacatgagtttgggtgttcgagaccagcctggccaacatggtaaaacctcctatctacgaaaaataaaaaaattagccaggcatggtggtgcatgcctgtagtcccagctatttaggaggctgagggagaagagttgcttgaacctgggaggcggaggttgcagtgagctaagattgtgtcactgcgctccagcttggggaacagggagagactctgtctcccctcccccccaaaaaaaaggccaggtacagtggctcacacctctaatcccagaactttaggaggccgaggcaggcagataatgaggtcaggagttcgagaccagcgtggccagtgtggtgaaaccctgtctctactaaagatacaaaaaattagttgggcgtggtgctgtgtgcctgtaatcccagctactcaggagtctgaggcaggagaattgcttgaactggggaggtggaggttgcagtgagccaagatcacgccagagtgatggggcgagactccatctcaaaaaaaaaaagaaaagaaaacaaaacaaaacaaaacaaaagtaaggacctgatcgttctgcttgtggagtttccagtttcctactagaaactcttctctgagacatttcattatgtgatctggctatgtaaatttttggcacaaaaagtaaatatcttaatgcagtggttctcaatcctaactgaatatgagaaaaatcttgcgagctatcaataaaaattcttggtcaggtgctgtggttcatgcctgtaatcctagcactttgggaggctgaggaaggcagatcgcttgagcccaggcattcaagaccagcctgacaacatggcaaaacctcgtctctactaaaaaatacaaaagttagctgggcgcttggtggcttgcacctgtggtcccagctactcaagaggctgaggtggggggatcacctgagcctagggaggttgagactgcaaatgagccatgatcgtgccattgtactccagcctgggctacagagtcatcctgtcccccccaacggccccctgccccgccacccccccgccccaaaaaaaagaaaaaagtcttgcacaagccccactcctgtccaggtaaaccagaatctctactttaaccaaaatcgcttgtttgtcactatgggccactcagtgactggcagtttgctgccaccagactaccttgccctccctgctctgccccgcttatcacatggtggcattcagcacatctggggaattttttttaataggacttgcttctaacttattcagtgtgttgtccaaccagatgttctctttgttactaagaaaggatacttggtcgggtgcagtggctcacacctgtaatcccagcactttgggaggccaaagtgggtggattgcttgagtccagcagttcgagaccagcctgggcaatatggtgaaaccccatccctacccaaaaaaactaaaaaacaaaaattagccggtcgtggtggcgcatgcttggggtggccaaggcaggagggattgcctgagcttgggaggttgaggttgctgtgaaccgtgattgtaccactgcacttcagcctaggcaacagagtgagacactcaaaaagaaaaaaaaaagggatagaagggatgcttcccacatctgagaaggttgatcaacattttggtaatcgtattctatctgttcataggctacttcaatttccacatgcaaatttaattttgaggctttctttagaatgacttctgcgtgtctgtgttaacagagttcagttccttaaaatgagaaagtgtccatggacctttaagtctacagttcttagtcttcggttgaaaagaatgtgtcacatttctgtcttttaacctttttataatgtaaccttttctatctttttctaaaagatagaaaattgtaaaaataatggaaattttatggaaaagtgtagttaaataaattatccatagttttacatagccagggtagtacctcatgtttattctgatatgtttgtttccaaattattttttctgtgtgtggcatatgatttttaaatacaatatcccgtcctaccatgtatttgtttatttaactgattgattttttaatgtctttttagtcccttttttgccatcttaaccatttttaggcgtgcagttcagtagtaagtatgtttgcattgcacatacttttatctttctaacaaacctagcattatcttatgaacatgtccttttattaagcattattcaaaaattcggcttctcaatggctgcagcctgtagtcctgtgattccagcagtcctttgctttgggctctgaggttatctcagccttgcggtgtagtagctacgcagtgagcatcctggggcttgaagcatcccacctgtgcctgtttgcaggccagcccctgcagcggagttgctgactcgcagggtgtgggggtccatctgccgtgagcaagtcatcctgatgcagccccaccagtgggactgagccatcagcccctctccctgcgagacgtttctcacctcctgccttctgctctcctgcctgtgctggccctgggcctctgtcactcttgtcccaacgccactgcctccttccttctcctgccctctgtcttccagcatcacgcggtgccgtctgtctacccggcctctccctcacacagctgtactgacttcagctggactctgtcttttcaccatcctcttccctgaatgtagagaccctgggctggctggctgggggaatttttcccccaagtcctttatttcctcctttggtgtcagggacatcttgtccaaactgcagggagcactccctctgcgtggggctgtgtgcggaagagcagtcaggggagtccctgggaagcgcgatgagcggtgatgactggtgacgtcaaggccttctcctcgaggctcaggatgggtgcgggactcggggtgttttccacctgtgggtgctcaggctctgattgcgtttcccgcttgtttgctgccttcctgcacatggtcctgtgttccagggctgggcactggggatgtggcaagggagtcccatggtcagctggtgagatgagtcccatggcagagcagagctctgcaggcacccagcaaggccacccaggaccagctggcatgtgagggtgggcctgctcgggtcagactcccttggttctggctcatcgtgggctgctgcctaaatgagtttattgaaggatgctgaactggtggtctcgggcatcttggaaaaaggtaaaaaggtgggtgctgcagtcagtcgcgtgtgggtcagtcacccccaagagtgctggaagctgggaaacgcttcccccaggccaggtgagggcccgtgtccagaccatgcatcctctgagcagctgtcatttgatgttgcaagttatttgggattctttgacctgtatctgcaaacacagccgtgggctcctggctctttgaggccccttggttgagtggagtgagtgtgggtgtcgtctcttacgacactgctgaggcccctggggccccaccagaccaaacaggggatgaggatgctgcttttttggttctatgtatccctcctcctttttggagggtggtgatggtgatggtagaaaggaaaattttcaatatatgattacttacatgttggacaaaatatatttagactgatcctcttacctgaacgcagagctgggctacagagagacccttctggggaaaggtcttgtgcgaagaaaataaacaaggcatcttcctctcaagtccagtgtggcggtggagcagtagcagacacagggaaagtgacccgggccatctggggttattcttggactttcttgttctgtcatgaccaagggcaaaaggaattgtttgaaaggtagacagtgtgtctgggtttacccctgaatgtcatcagggaatgtcttttaacacaagaagatggcaaaggatattagcctttcttgtgatgttagcaagcctggatctcccggggggtgtgtttgtgaaggcagtttaataggattgaaagagcttgggtcttggagactttctcgctgtagactttgagcatgcttgttcatgcctgtctttgagcctcagtttcttgtcagtatggtaggttactgaggatttgccttgaagtgtcctcttgaaagagcgtccacagataccagcatgtggtgggtgcttggtaaatggtagctacttgttggcttaattgtttgcgggaaagcaaaagtgtgaggcttcagaacagtgctggccagcgtggtaaccacttgtcacatgtgactagttaaatttaaattaaatgaatgaaataaaagtaaattttcagttcctccatcacgctttctacattttctttttttcttttgttttgtggcagggtctcactctgtcactcaggctggagggcagtggtgtgaattctgttcactgcaacctccacctcctgggcccaagcaagtctcccatctcagcttcctgagtagctgggactacaggtgcacaccaccacgcctggataatttttgtatttcttgtagagatggggttttgtcatgttacccaggctagtctcgaactcctgggctcaagcactgtgcctgccttggtctcccaaagtgctgggattacaggtgtgagccactgcgcctggcctatgctttcacattttcgttgcttgttgttaatggaacattttccatcattacagaaagttctattggacagggcagctctagggtgacagttgggtaataggcaaaggaaattattaaatggaactctgccatttgagccccaattccatttgggccagcattttctgataacttaatttgtctttcaagcatggaaataatttagacttgactatgagaaaacagcttttgctgttgtttgccagaagatattctgatgttcctttgtttgtttgtgttctgtgattatagcatttaagccaaaacaatctctgttctctttttgtctccagtgatggatgtaacagatataataaatggaaaagtagatgatgaagataagcagcatttcattccctttcagccgtaagtatggagcaattcaagtacttagccagatataatgtggaaaacataggcttgtaataattatctttataattaaatggataaacataactaaggattgattattttgtaattatgaaaaacctctttagtcactgctgtagtacatggaattttttgtagccataagaatcctgggtcaaagtttgtttatggtcctggaagtaggagattttacttgtaatcactgaattgccttatatagaaggcacagagttacagctctgctctgagcctgaatgtttctttacataattgatttattctagtagctatttgtattttcaaagcacaatacttccaaattcatcataggaggttgctgtttttaaaataaaaaaacaaacaattatgatgaattattttaaagcgagaaataatgctttaaagcatataatcacactgctgatttttgtgtctcggtttttgcttagagtggagcctatctgtgttcgtttttaggctttctctagttctgacctgaagtctttaaagaggcacggaagctgagaaaaagctcttggaggagattcattaaattgattatctgatttgtgggtagaacccagggaactggtgggaagaactggcgtttatttccctcgtgtggaagcaagagtgtacccagatgatggtcgttggccacttaagcactcctactcctcacagaggaggagagaaaaaggaatccagatggttgaggttaattgtaagagacagcttcctcctgggcgtggggttgggtggcgatgttaggggagaaggcatggtaagggcagtggaagccacctgccatagtgctctgcagtttcacttttccctcatttttattcttaatcgacttcagacttgaaacacatttcagattttagaaattttacggttttcagctgttggctgaagggtttaggaggcgggtagtaattgggtggctgaaggagccctgtccttgggggcccggagatgtgaggttgacttccctctgccccacgcatccttggtgatggaccaccgcgctcaaccccacccgactcctctgggtcttgagtgccactggctaagacaggaagagtatggctttctttgcaggcgggcgatgtggtcacatagcaccctaaagctttttgtacagctcagtaggagattttgctatcttcttgacgtaagaataacagcaaaccctgcgttattgagctgggagtcagggttaagttatatgtatctcagcatgcacaactagaggcaaaggtctctttgtggcttaaatgctttaggtttactctcctgtccaatatggtaaccattagctccatgtggctatttaaaatacttaaaatgagctgggcgcagtggctcatgcctgtaatcccagcactttgggaggccgaggcaggaggatcacctgaggtcaggagttcgagaccagcctggccaacatggtgaaaccccataactactaaaaatacaaaaattagccgggtgtggcggcaggtgcctgtaatcccagctacttgggaggctgaggcaggagaatcgcttgaacccgggaggcagaggttgcaatgagccaagatcacgccactgcactccagcctgggcgacagagggagattctgtctcaatgataatagtaattagaatgaagtagcattaaacatttagttcttcagtcacattggtcctgtttcaagtgttcagcagcaggggaggtcagtggccccgtcctgggcagcacatacatagcacatctccagcactgcagaaagctctgctggattatgttgttttgtagtcccatccagtgaggagagtttataaagggaacacagtgctgcagaatctggaagtttccttagcaaacaaggggaacagtatcatggaacatgggcagatattgaggtcataaataaaatacacctttgtaaaattataatattaaattgcctcattctctcatgagaaataatgcagccccctgctgttttgaatgctgtattatatattagacctcagaggttcttgatgcccagatgtaacactaagttgaaattacctgttgcctgctagtgtcctctgtgaaaagtcaaaaacaaaaacaaaaacaaaaacaaacccaacctgagggattgtttgaaaggttagggaggttattagttttagattcactgattttcacagaacatgttatgagttgtttgagattgcctgtgctttgacgccatctttttctatcttgtagtggaatgtccacttgaaaaatatgttattccatgtgtaactcttatgtaatttgtgactccatgctccattaaaggaagactaatagacagatgaatatttgaagtgttggaaacaaaagaacagcatgatttttaatagcaaaataagcagtgaaaccagttctttgggaaatgtcgtgctaatgaaaccattttttgctccattaaaactgatttattatctcacagggttggttttagagaaggaagcacattgcacatctccctccctccctgtcttttttaacttggtgacgtaaatgacaacagtcttcagttccctcgagtcatgtggctcaagtgatggatagcactgtccttgttcccaggattgattttaaacattatggccatgctgtctattttcttgctcatttcatagtgcacttcgctgtgctacatggtatttctatttgggcatatgccccccgtttgtagccagtctctcgtacagcgcagcatctgtcacaggctcctggttcatgggccctgaaaacgtgggtggtctgtgttcataacagcgccacacgtgggactaggcagtggtgttctccacacacggtaccattcttctcacatgtagtcacttgagggactattgtgtacgtagtccaggagggtagagtagaaagcctttgcaagcagttaggttccagggatttttttttttttaaatcttgattttgcttttccctttagatcaacctgccccttgacctatgctatgttcagaattaattgaaattggaggaatggccataaacattctttgggattaaatgcctttcaaccatgtggctttcagacaagctcctttttttaaacacaagagtctgatggagatgcagtggaggcctggtgcacgtttattcctggggagagggttgccctcatttgctctgttccctctcgtggttcagcattttcctgatcaatgcttttccctgtttctcttgtcacctctcccatcctttgtcgtgcgttgactcatgatgcctccctctcgcactcggtgacgatgatctcttatgttcccttgttaccgtggcccatgggtctctgtgcccctttgtctcctgtggtcttggtcgtcccgtgccctccaggctcgcgttggacgacgccattcgacacaagccgctgaacatgtcatcccgtttttcacccagggtggcaggggagaatgacttccttcagactgttataaacaaagtcatcgctgccaaagaagtcaaccacaaggggcagggtacgtattttcctattttgtttctatcagcgtgtatttgcatgcgttggggcagtgctgtctgggttggttttagtttgatgttgatcatgatggtggtgataatgatggggatgacagtgatcgtggtggagaatgtgtgtgacagttgcccctgtgtacagtgcatgatggttttcttgcccgtcacctttgtgaacattgctgagagcccactcctggatggagagtggggtcagattagaagtttagaggaacatgcaggcggtaggcgtaactccctctgcccgtgttgtgtgctaatctttgcctgttctgggtcttccctgctggtctccctaagaaggtgatttcatttgtgcagacttgctcccctgagttctgtcatttaagtgatttctccgcccctacactccgcctcacactcactgtttttaatcctgcactgacacgtttctgagcagctgacctgctgctggcagaaggaatgaatcagtcacctcgggctggtgacagttggcacttggctggccaggagggctgccaggaaacaactgtgactgaggccccgcctccagcccaaggggaagtcaccttcagaacttgaccgtctcactccctgatccatgcagactgcccgtaaacgcggtagagcttaggtgaacagacctgcttcatcgtccagctaccttatgtcactagacttttaaaaaacaattatcttgattcatttccactgttctaaaggagaatgtgaattgagcctgaagaatgttttagagaatgagccttcctagggatctgcagggacctccagctttcttctggtgtgaactacccccctttctggcaaacagtagcaggacaaaaaccccaacccagaacgttaatgagatgtggcctctgcagacagagcgattttcagctgacccaggacccatcttctcctaaattaacagccctcccaatttacactttaattgaaaaccacggggaggtccaattagggctgtttagattggagtcactctcaggctgggagtgccagtgcaaaggttgccagccgatccttcagtgcttcgagctgggactgccctcggatctccagtttcttttgcagtcatcggagttttgataaacttttattagagtcattcagggaaagtggagtttggtgtcaggccagcaggaaatcactgggaaagaggaccagaagcctgcctctgccaggctcactggtgtgtggccaggatctttgaagccggcgaaccttgggctcatgtccgggggtccagttccttgaacttctgggaggagtgggcattttcaagtcacagtgaaaactgagggagaagaacagtgatagttttgtcaaggggatcacaggtgacttcctgaatcagaatggccttaggcaacatgactagtgcttgttttccttgaacctgaattttctccagggcacaatggtgggtggaattcaggtcagaggtgagtgatgtggccagtgagggcagccacacagatcggccgccgggactgcagggcgctgcccaccggcgctcattttatcaccagcagcccaggcttaacctgatccttgcttgtctgtcaagtgactgttagcggccccaggagtggaagggacatggaggagatactcatcttcagagagaaccactgggttttttcacacctctgtccacatgcgcctcctgtctcttgagctcaccacttggccttggccagtttttggtttatgccaacatgtttcctcttcacaagagacaaaaatcctgaatatttaatccaaattattctgatccctgaacccagaggtgtgggacattttatgtggacagtgaattcatgaagactccagacatctggttctgttgtttgagatagaatgtatgctaatcctctttgtttttagttattctgcttaagcaaatgtcaaccccaaatgcacttttttctcctgtgagaaaagcatttaaaacacagcataatcaggaacatttaatttccatttttaaagcgtgtggtaataaatttaatgtgtcactagtgcattagtttatgtattaagatatttgcgcaggccggcgtttctgagaaaggtgtttgaaacacaggatttctaatattaagtgttaagtgttccatcctcatgtctcaacctttgacctctgtagataatgacctcaccacatcctgcaatccttcaaagagcatctttctgtaagatatattttgtggacattcattctccagggaggcttttggactcaaactcctgagatttgagaaactcttagctgcatcctggtgtcccagggaagaccagctccctgtgagccacggtgccagttcctcaggctcttctgtcagggtctgggctttggtttgctctcccggaggccagggctgggggttagggtgaggaagtgcctggccctttgcccatctgtctgcttacctattctgcaggtctggagctgctgttagctcagggtgcttttgtgtgaattagaaaaaggggcctcatcaaccaggtgagtagggagatgcagccagcgccaggacctgtggctctgtgagcgagtagaggcagggtttagctcccacttgccttttgtggtcacttgtctagtgaaatgcacattctgggcagtggtacatgtgctcctgtctgggtgccatccccgatacctctttggggaccgctttctattggtggttcttccttcttcaaactctccctcccatgatctggaatttcatatcttaaaaagaaaggaaaaagaaaaaaaatatttaaaaaaaaaaaggaaagaaaagaaacaccaagaagcagtcctaccctgagtaatacatctgtctctgtctatgtggcctctccctctggtcttcgtctcccattcatcttcacccttctgcctcccagcatcggccctctccctgagcgcccccgccccctctgcccccgtctcccaccaggagccctgtggctgcatgggcaccatctgtcccagttttccatttcccctgttatctctgaggtctctgtccccttgtgagctctcaaagtgggcctttctcctgcctcttcggggctcttctttccttccccactctgggtgcttgcccttcaggcagctctgcctggagcgagcgggtcttcctatttcaaggaacggtgcccccgggacttgctagtggttgtgcctgcaaggggcaccgtctctgtaagctgcgcctcctcctaccccaactccccgtggttctgctgacttgaccttcacgctggtccctctcccaccctccatagtggcattcacgtcctgccagccagctaggatcatgcggtggcctccctgctgcgattccatccccactgtgctctgttctcctgcctacccattccctgtagccacagggtgtcaggtcagagcctgactcttgttcctgagccccactctgggtgccccccatccttcagatagaccacagtccctgccaccccagcctccgcactgtcttaccacagcgtctgggggctccacctcccctgggtgaggacaggcctgcagttccctcacttcctgcaggtctcagccccgaagtcccttcctctgtgacccttgagactgtggtcccaggatgccttgcagtgtgctcaggacttctcccgtgagaacttcgcagttgcatatttctctaagagaccatggagttagtgtttgaccgttggcaatggaagctaaacacctgtcaggggaggtcgtgagggtctgccctatgtctccagtaggtgcagtgcccagtatttgcctggcacatagtaggtgctcagtagctacttttgaataaattagagggactcactagatagcaagaggaaagggggtttcaccagctggcaaagaacaaaacatcatcagtgacttttgacttctcagctccagctaatggaaatctgagcaaaggagaatgccatttccaggatagcggatataggaatgggcagccagaggacagggcgtgaggtgcgggattgaatcaagcagggctgctcccgtcagggacagccggaggtgccggcaccgctgtcggttacctcccagtgctgctcagaaggcaggctgctggagaacaggcctgtgactgtctcagttccttccacgcagggcagggcgctgagctgagggtgatggagggcaggttctgctctggaggcatctgaagaggggacagctgcacacacacacacatacacacacacacatgcacacatacacacacacagatacaaataccacaaacacagacatacgcacatacacacacacacaccacacacacacacactaacacagatataaacaccacaaacacagacacacgcgcacacacacagatacagacaccacaaacacacacacagatacactacacatacacacacacagataccataaacacacacacagatacaccacaaacacacagatgcagacaccacaaacacagatacaccacacaccacacacacacacacaccacagacacacagagatataccacaaatacatacacacgcacacacacacagatacagacaccacaaataaacacagatatgcagatacagataccacacacacacacacacacacacagatgcagacaccataaacacagatacaccacaaacacatacacaccaacacatgatacaccataaaaacagacatacacacacagatacagacaccacaaacacacacacacacacagatacaccacacatacacacgcacacacagatgcagacaccattaaacacagacacacacagatacagacagccccttccactcagatatacatatagacacacacagacacacacatgggtatagacacagacacgcacacagacatatatatatacactcacacagatacagatatacacataagcacagatacagacacagacatacatacagatacagacacagacatacatacagatacagaaagacacagatacagaaacacagacagacacagatttagccacacgcatacagatacacagacacagatacacagagacacacacagacacacacgtgtacagacacacatggacacacagacacacacacacacatgcacagatacagatacacagacacacagtgactcacacagacatacgcacagccacaggcatgcgcgcatacccatgctagtagcagaaatgaggacagaggctttgatgttctgaggggcagatgaggccctaccaagctgagtggggggaagcaagcaggcagccccccctgaggcctcagggacagagcacccccatgtgctggcttatagtgccagccccttcccatggggggaaaagatgccgtcgtcgtagaagacagctcaggccgagcccctgcctgccccgcctttgacttgttggaatgtgtggcttgtttccttgtactgtcacctcctatttggttgctactcagtatttatacaaaccacagttctttgtcagccttgcagggaggaagatcccgcgcacatcccgcacacacgcccttacacatagaccccaccgggtttactgccctctccccaggatacccctggcatctaggtttagaggctttgaaagtcttcatttctctcttggagaaaagagccgagagcggctggggctttgttttcttttgcggtggcactgtggtacagagggcctgggctccacaggctgcacctgtcctggctgcggagggctgtcctgctggtggccctgcagactggtgctccactgctcgcccaggttgtgtgatgctgcttagctacttgaaactttgatgggttctcgaagctacgaattcacctccagaatcctcccctgcctttgtctttcctgggagactagaaaatgacagacttctcagccacctcctagaaaaaggtggcctgctgatttatcttaaatgtctacccactcaaaagagacattggtccttggcattcctcagcagcacagtgggtgcacagcagctgctgatgtgcgttcagctgtctgtgagtcaccctagggcagggctggcatcccagctcgttggatgcatggagtccccacgacaggcaccttttgccttgcccctctctttctcatatacccaccttttctctcaagatgttgaattgtgaattaaaagtctctcattcattgaaattggtttcgtgaaaacttctaaaaatgcataggataaaatgcgacttaagagcatccattgtttttccaggtttgtgggtaacattgaaattacttcctggagatatccatcagatccgaaaagagtttccgcatttagtggacaggaccacagctgtggctcgaaaaacagggtttccggagataatcatgcctggtaagaactggcttgttcagggcttctcagcatggcatgggggtagccggccacggaggatgacgtgtgggcagcatcatgtatgagctctggcaaggaaagggctcagctcctggtaggtgaccctgtaagccccagcatggttatggatcatggggctgtgaccggagtggtagaatatgctccctggccccctgtacccctggatggatcagctctccccagctgcaaggattgtgtgaggggggcgtgggcacccagcaaatgtctgggtagacatcaggtcaaaagaagaaagaggtcagaaagggagctgcccattgtgaagcccacttagggcaaatggcagggttggatggtcgctgaatggaaatgcctgtgcctgcgcccgctcagctagtgtacgttatactggcattcctccatgaattctaagtcatgaattctaaactgaccgataacaggatttgcgtgttaacattaatctcatatttacataatacttttcattttccaaataacgttcctaataatctgatttgatcatcaagagatctttggaagcatgttaatttgtatcctttatatccgtgtgatactttttggtttgcaagtaatgcttacgtggcttggcagggcgtagtggctcatgcctgtaatcctagcactttgggagttcgaggcggggggatcacttgaactcgggttcgagaccaccctggggaacatggcgaaaccccgtcttgacaaaaaaataaaaaaactagctgggcgtggtggcatatgcctgtcattctagttactttggggggctgaggtggaggaatcacttgaacctgggaggcagaggttgctgtgagcacagatcacgccactgcactctagcctgggcgacagattgagaccctgtctcaaaacaaaactaacttgaaccacgtgaggctcttggaagcccacaaattggtgttgagtgaattcctatccagattaaactgtagcctaaagtcgctcagctaatgagccgtggaaacggggacaaactcccccatattcaacgcggcctccttttataggcctgtgctgtatagccaggagagtggtggctattcagggtgcatgctgtaggagttactgctttgcttactttagtgcaacttcaagacacattctttctactccttttgtctttcagggctgttgtgggtcattgaatagtcggtctggtaaatccatatgaaagacatctaaattggttaggctaaataatagctaggcttacctgtacagaaagaaaagcatgacgtttagtcaattctgaagctattgcttgtgtgtgtccagtctatatgcaggaaattaatttaggtttattaatgggagtggactaatttgtatacttattatttgtatttgcatttgagatacagatttataaattaggatgaagcaattggcaatatgcatttatcttggcatccttaggatgtcctcatgttcaaagggaaactcagaagcttccagttcatgccaatagtgtttcccttatgatggatagacttaaaaactaagtctaggcccggcgtggtggtgagtgccaggtagtagctgctagtagcaggtactagggaggctgaggtgggaggatccctggagcacaggaggtcaaagccgtagtgagccatgatcacaaccactgcactccagcttgagtgacagagagagaacctgtctcaaaaaaaaaaaaaactaagtctaaacttgtagatcatctcatgatagattcatagggaaatgatacagttgaccattgttctggcaggttccatgtgctgagtcctcgggtatatatctcacaggaagtgattctagcttgggtgggtcatctgcgttctctgttggccgagtaatcactggccgcgctgtgggcaccagagagagagagagtatgggcggttatcagtctgtctcgctgtctttagcctgcagaacctgtgtatcacccggttttgtcactgtctgcagggatgcgcgtcttctttggacagcgcagagcctgtcccatcacccagcggcctgctctgctactttctcatagctcgttggactcctggaatccttatgaaggatccaggcaggcgatgccaagttttcctttgagctgggaaggtagcaggagtccactatgtctgcttctagttccttcttccccagaatgttctgtaacctggggaggcatttgatgagggtctatggtgaatgcccatttgtggggtttgcttactgtaaatgaggtcttacttctgtgctggccctggagtaacgcacttgaggtgtacttgggagtgaggctgtgggagtttcgccctgtcacccgggctggagtgcagtagcacgatctcagctcaccgcaacgtctgcctcccagtttcaagcagttctcctgcctgagcctccggagtagctgagattacaggcacgcactaccatgcctggctaatctttttattttaatagagacgggggttcactgtgttgcccaggctggtctcaaactcccgagctcaggcaattcacccacctgagcctcgcaaagcgctgggattacaggcgtgagccactgcacccggccttgaagttcttttttgatgatggtgtttgtgccttgatagaatttttaggctgagagatcatggagtttatgccttccttatcagtgaggctgtttagtggtgctggccttggaggctaagtgacttgtccaaggtcacacagcaaatgagcaacaagtcttggttgggtggccttgcacctgcccctcgtcctgtgctccacggttcttctcgtggtcagtatcagtgggcggcagccgcgcctccttccacacagctactgtggctgtggtggcaacccactgggattatgatgataatgacttttaaatgaaagcttaatttaatagttggatacattaaaagccaaaatagagcagtttaaaagaaaaaaaaaagccaaaacaagaaagcaaggagcaaagagagttattttccttaagggatccttggtcttcagccagaatgggcatttgctgctcttgacggaaccgctctttggctccttgggagagcgggtggtcagggcgtgggaggtggccaggcaggcagcagaggagcagtggctgggaacgaggcttcctctaaatcatgttactaatgaagcttgtgaagttctcccagttgggccattaccaggggcttcctatgttctcagtaggaagaagagtcttgagctcatttcttgcgttttttttaccccctacaattaaaagcccatctcactttaaaacagacaggtctgttttgttcttctctctgtggtccccattcgggatcctgatagctgcctgccagaagggaagagccatgcagaaagtttctccctagacccgtttttcctccctgattctaggctggtgatcctcattctttttttctttatttttattttattttattattttaagttttagggtacatgtgcacaacgtgcaggtttgttacatatgtatgcatgtgccatgttggcgtgctgcacccattagctcgcttttgagacggagttttgctctgttgctgaggctggagtgcagtggcaggatctcggtttgcggcaacttctgcctcccgagtagctgggattacaggcctgcaccaccacgcccagtagctaatttttgtatttttagtagagatgagggttcaccatgttggccaggctggtcttgaactcctgacctcaagtgatctacccacctcggcatcccaaagtgatgggatcacaggggtgagccacctcgcctggccggtcctcattcttaatcaacttttagttcaactcttggagtcatgcttttaagaagaatgcataggaggcaaccttgccagttacctgggagtgccagtggatactgcgatagtccttggctactgaggactcagacagccgtagccagccgtctaacaagggacaatggtgtgggctgccatgggtcatggatgccatcaatagtattggagcccctctggttgtcggctaccctgagaggggtagagtgtcctctgcccagatgataaccaagcagatcattggaaactttgagatttttcctctttctagaaaactttatcatgatgaaaattgctcttgtcatgtatttaaatggtgagactgttttgtagaaaatatttcataatcatctaatatgtatttgtaataatctatgaggataggtagacagtcttgcaaaattcacaattacgctattaataatggattgttttttaaatgtatgatttctcccccctcaggtgatgttcgaaatgatatctatgtaacattagttcaaggagattttgataaaggaagcaaaacaacagcgaagaacgtggaggtcacggtgtctgtgtacgatgaggatgggaaacgattagaggtatttattgtggcgagggctcatctgtagtgtttcagttttacttgccaagtgctcaccttggctctgctacagcatagatgtcgtcagggtggggctttggagtcccgtttcttgggattggcgttggttcttgtttccttttctccagcttgccatgcagggcctggggtcctctggtcctggcagctggcctatctcaggaggtccctgtggtcttttttttttttttttttgagatggagtctagctctgttgcccaggctggagtgctgcaggtgtgtgccaccgtgcctggctaatttttatattttttagtagagatggggtttcaccatgttgacctcaaataatccgcccgccttggcctaccaaggtgctgggattacaggcgtgagccacagtgcccgagcaggtccctgtggtcttgaccacctttgcccaaccttatcgtggagtctcatttgctgtcacaagcccaaggcctaaaggtctagcagtcacactagaagtacagataccattgttacgatttgagagatgaagaaaaatgaaggccctaagaaatcaattaaattgctcagcgttagagagctctaggggtggaactgagcacctgctcatgacagccagagctctgacctcgtgctctacctaccggcgatcatgaagatctgcttccgtggccacagcagcctgcagggtccacctgggaggtacttagaagctattgcctcctctgatgaccagaggtcaaatcagagctgctgtccctgtgaggtgcctctttgcaccagtgctggaggactgggcttttctgggcccatggggttgtgcctaaggctcagtgtcgccaagagaagcattatgtctttctctctgggtgaactctgtccagcatcactgcctgcctcgtctccctggaaacataggtgctgcccttgccactggtctttctggttggagtgaagcaaacagtgttcatggctggaggaaggggaggggagggttcccactttttagtctacagtccctcaccctagacctatgggacggatcaggcaacttcctgcagatcctaatgttaaagttattagggttgagggtctggggaactggaggtcagtgtcatccccatgtgtcataaccatcaagatcttcaatgtgtgagaacaggggttggagctggccgctggcttcaggtggatctgtgcttcccttgctgggaacgtgttcatttgtggtgggggtgtgttggtgttcttggagcgtacctgtccccccacatatatagtgggagatgtatatggtgtcaagctctatgaggtcttacgtgagctctttatgtcttcttttaaagcatgtgattttcccgggtgctggtgatgaagcgatttcagagtacaaatctgtgatttactaccaagtaaagcagccacgctggtttgagactgttaaggtattatttacatggtcattttatcacatggcgctgattatgaaatgctcatttgtaacccaaggaaacatcctaacatcctcctcagcccgggagctgctccaggcaggcagagtgtctcccaacaaagtcattcaaggttgctaaggaaccacactggtgtttcttagaatacatttactctcatctccttttggacgtaaaaataggacgttcatggagacaaatgacagagtctttttaagatagctattgtctttctcttcccagtactgttttatgtgtggcatgctgtctttacaccaaacaaaaaaaccgagctgccagcctgtggaggtcattgctggggagtgggatcctgttctgtagctctgatatggtgccttttcataatgcagcgtgctcacatctccacgatggagtaaacaccgtctcaccgccaagagcttgaatatttgaaaaccaggccaggggttggctctggaatacagatgtttgatgtgagaattagggacaatttttgcttagaggcagcatgtattaggtcttttttctttgagtgtaatgtgacaacaggaaagcttttttggcgcagctgtgggcaggtcaccacagctgtggaaggaatatagacccttccaggttggggctaagaagaaaaacggcaacttttctttttttgagacggagtctcattctgtcacccagactggagtgcagtggtgcaatctcggctcactgcaacctccacttcctgggttcaagcgattctcttgcctcagcttcctgagtagctgggattacaggcatgtaccatgatgcctggctaatgtttttggtatttttagtagagttggggttttatcatgttggccaggctggtctcgaactcctgacctcaagtgatccaccctcctcggcctcccagactgctgggattacaggcatgagccaccatgcccggcccaaaaacagcaacgtttaaaagtagaatcttggccggatgtggtggctcacacttgtaatcccagcactttgggaggctgaggtgggcagatcatctgaggtcaggagtttgaggccagcctaacatggaaaaaccttctctactaaatacacaaaattagctgggtgtggtggcgcatgcctgtaatcccagctactcgagaggctgaggcaggagaatcgcttgaacgcaggaggcggaggttgtggtgagccaagatcgagccattgcaccactctagcctgggcaacaagagcgaaactctgtatcaaaaaaaaaaaaagaaagaaaaaagaatcttaacagtaatggtcagagcattcagaaaaaaaaattcagctgtgtcacggagtcagttggcttggcagctgttacaatatgatacaaaattttgcagaggcattttgtctttggaaaaatcatataggggactaggtgtacagtattttcaccactgcagttagaaatgtttacagttgtacctgatagctccagttgaataaagctgttacgctggatgatattgataacagtgcttaaacttctttttcaattcttgaaggtggccattcccatcgaggacgttaaccgcagtcaccttcggtttaccttccgccacaggtcatcacaggactgtgagtagtcaagcactttcttcccccaagtatttttaagggagaactgggggaaagcgcgagaggccactctcagttgttctggaactcgctatcataacacaataaggctcatttcccaccggaacctattccttggaaacattcttctctcttttccttgagcagatctcaggaggagatcttaatttccttctccagttcctcctacccagtgttgctggtccccttctttcttttgctttccagtcttccgtgttgacttgccatccatccatgccatccatcagaaaagttactgagctgtaacaaatacctctcaaacatgggctcttaaggtgcctgtcttagaattggaaatcttgaaccctttttgtcttccttggtggcccttgctgtctggagctcagggatggcttttctcatagacatttttgtgaatactgaccatggtgccaagactttaggaggaaagaactgctatttgaatcactctccttcaaaaagaatttattattgatgactgaaatttgttccatcacattttgttaaattaattgtcaactaaagctgtagccctgtgctagacagtaagatatcacagaaggaaaacatgattcccgtctttcagggtgtgtgtctctttggcattgggaactgagacatattcatatttgggacaataaatgacaaagagagttggctacaggcttgtgtgccgcaggcagttaaaggaaaagagtggtgtggagggcagaccgccctttgtcactgatgaccccgtgggggtcacaccgtgcagtgggcagtttcaggttctgtgtgctctggatggagcttaagcatgagcctcttctgtatcttcatttgaggataagaatacctttctggctggtgccgtggctcacacctgtaatcccagaactttgggaagccaaggtggaagattgcttgagccccggagtttgagaccagcttgggcaacacagtgagacccgatctttactaaaacagttatcctggtgtgatggtatacctgtagtctcagctgctcaggaggctgaggcaggaggattgcttgaacccgggaggcagaggttgcagtgagctgtgattgcaccactgcacttcagcctggggaacagagtgagaccctgtctcaaaaacaaaaagcaaaacaaaaaaaacattaaaccttcctcctagggtattcttgaaggtcaggcaaggtggaggctggccaccttctggcacgctgcctggtatggataggggctccattgtagttgctgctgctggaataatgtgttcattcacctgactatttctggggcctggcctgccctgggccctccatgtggggtgggtgtgcctggacaggggggctgcaggagagcagcctggagagcaaatgcacgagcacggtcatgatgttatggtgtgcagatcatcgagaagcttgggcctgctgttgttcaggggagttggagaggcctggtgtgtggtctgcagagctggggtgccggcccatgactgtcaatggcagatgtgtgtgtggtggggcccggcctgggatgtggctgactggaggggtttcaagcagcatggagtgcctggtggtgggtggtgcatggcgggggagtgcggggggtgggtggtggctggcagctgccgaaagcatcattgcattcctgtcctgtcccaacagtgcatgcaggccaggggttcagttacaagggcatcaggtttatgtctaacgggagaagcaggggcaggaaggccgccagcttggaaggcagttccctgccatctcatccttgccccaggatcagatccaggctaccagaccccagaccaagtcggatctgctaatggtgcacaacatccttggtggccgaagctgtaggataataacaactatcagcagatgttggccatcgttcactatgctcttatcatgtgcccgacacaagaagtttattgtgttatttggattcgtcctcgcaagattcccatgtggtatcagtattattacttcccacattacagatgaggaaactggggcttggaaaccccaggtcaggggctgaaaggcacccaggtagtcagtggaagagctttggttctaagccaggtccttgtgcccgagccttatgctccaatgccttgggggagtggcgaggccacttctttcctttggcttttattgagttcctgctgtatacacaacaagctgctggggtttctcctcttgcagagcttaggtttgagttgaggtttgagattagtttgcaagaaccagctagggcgtggcagcctgtgagtatcacatgaattaggcagaggtatgatgtgagcggagggtgctggtggaatgggggtggctgtgggcacaggtgtgtcctcgaccaaggcatggagggcatggtgggggccagcctagtgggctgcagtgtgccccagaccctctagggctccacgcatatatcaccttgaggcccacggaggaagcaggttaagaacggggttctggaatccacagaggactcgtctcaaaattacgctcccgtcttttaacaagctcattctctctaattaataaattacactagggcagagcgatagctcctgtagcattttaattttcaaaatccttgtttttcttgtcagttttaagtactcattatagacaagatgctatcacccaacataccaggacacatctgcataataaatgaagtctccgtggccacagcttgtgggattttggaaacatgttgagcatcgcaggtgcgatgccgatgaaagcctggatgtcggccgctgaccatggccttcggggcctccccagccagccctgcatgcagatacctggggcagaaacaggtagaaagagctgaggccacattggtccccacttgctaccctgaagaggaggctagcaaagggaacaagtgatgggatttctcacctgggatctgaccttgggattggaaagtttggtgtcgatgggttaacataatacctttccagcaacctgtcggcaactccagctgcaccagaccgtgtggtccacggagccaggcagacttgcagctctcaggcccagctggccaggagctgagttttccttgattgtagtgggcttgttgggtagggcggcctagagaatgggcagctctacccacactccagaacacacaacccctactgctgttcctaaggttctgtaaacttgtcatataaaccatccatctcatgatggctgctagtgagcatgcagtaaaaagcggtccattcctcggatgtgaagatgcagaatgttaataaaaggtgcacttactgtactacttactggtagggtcagtagaagccttctgctgaccattattgtcacacatccttctgaaccctggctgttttcctggaggcatgtcttttttgttgccgttgtttccaagtccacccaaacttaggaggaactgttctgttctttgccatttgaacattgaaatatttcatgtgctctggtgcccttttacagagttatttttttagaatcctagggtacatatattttacttctgtttcttcctgtgttttttggctggttgattattcatggaaccatttaatttgccaggatgtattgagcacaaccaggaaggcaaaggtgataagccatgttgtcttgggtagtgggatccgacggtaaatattttgagccgtggactcaaggcgggtggatgtgtcattctccctctctgatctctgtcctttcatctataaagagaaagctcggaatctgtaattgtagagatagtttccagctctggtcctctgtttctgtgctctgctgggattgcaacttgaggaatttctggcagatccatttcttcagtccatgttcctcatctgtcctggcttatcagtccttccccgcctttggccctcgctgtctgtcaccagccacactggacttctgtccccagatgtgccacactggtcctcgtgagggcctctgcgctaggtccccctcttcctgcagcattgacatcttggcttatgtgctgtccagcttctcagagagatgtcttctgactaataaattggattgtccccgttgtcactgtgaccccttaagaaaccacaatgttttgttttctatatcatctgaaagctcatttgtttgttgactgtctcccaaagtggcacaaatatggattgagtacctgttgggcaccaggctctatttcatgtactaggaaatggcagtaaaacaaaaggtcacttacattccagggtctagtggatgaaaccaacaataaatagcaacaagatcaacaagattctctatcaatctatctctatctctgtctctgtctctgtctctgtctctatctctatctctgtctctctgtcacacacacacataaacacaacatctggtagtgataagaattatcacgaaaataaatcaggtgagaggaaagagggtgattgggtgactaatgggctattttagacaagatatggtcactttggaggaggtgacattttggcagaaacttgaatgaagcgagtgagccccacatgcagatacctgggggatgaactttctcgccaaaggcagcacaatttcacattggggtcgttagtccattggtaattcacatgatggatattgcaaggcaggaattgattttagttttctgtattgacccgcagtttccttggtggaatggtctgccccttcccagcctctgtcgtttactgtggcctcttgtttccaggccctgttgatttccgctggtctgggcgtcttaggttgaaagcacacagtctttctcattgtcattttacagttactctcgctttctagtgttgcgggctttcctctgccttcttcaagaccatgctgctcttcttggccctttatcctggaatccgttttcacgttccaggaaaaatctcttctatgagattttgattagaatggctttgaatttatagattaatttgagaacaactgatccctttatgctaggagtcttcttacttgtaaacgtggtccatttttccatatatttattagattagctttaatacctgtttgtataattttgtaattgttttcataaaggtagcctttgtagcttcttataatgttattttgtcatgataattgaaagcaatcatcaatttttttgttttttgttttacagctaaggataaatctgagaaaatatttgcactagcatttgtcaagctgatgagatacgatggtaccaccctgcgagacggagagcacgatcttatcgtctataaggtatctggttgcattggtgcaatattgctgctatagacagtttcagtcttttctgggctccctgacctggaccaacctttcccatcattgtgaggaagctgctatctagctacatttaattatgcaaatgaacatttccaatgaccagcccttttgttgttcctaacgggaaaagatgatatacaatataacaataggtgccatctaaaaatgccgtgaacatgaattatgctgcagtaataagggaaattattaaaatgtgtatttaatatgatacaaagcaattacgatggttacaaggattagggataacaaagggtggcaaaaatggtgtgttgctgtttgtgaattgcctttgacatacggcatgactaaatccacaggccgaagcaaagaagctggaagatgctgccacgtacttgagtctgccctccacgaaggcagagttggaagaaaagggccactcggccaccggcaagagcatgcagagccttgggagctgcaccattagcaaggactccttccagatctccacgctcgtgtgctccaccaaactgactcagaacggtgcgttcgagaggagaaacacactcaccccaggagctctgccccagtcctgtcttttccatgctccttcctatgtggaggtgtgctccgtaggtgcatgaacgtcacccataaggcattcattgcatcgggctgtgatgatttatcaatgcatagaaggtggcatttgttcatttgttgtaatttaaaattcacacttctactctggtctaagggttattcttttatttttatttttattttttaagacaaggtctcagtctcgctctgttgcccaggctggagtgcagtggtgtgatctcaactcactccagccttgtcctcctaggctcaggcgatcctcccacctcagcttcccatgtagctgggaccacaggtgtgcagcatcacgcttggctaattttatttttattttttatagagatgaggtctcactttattgcccaggctattcccaaactcctgggttcaggcaaacctcccgcctcggtctcccagagtgctgggattacaggcacgagccactgtgcccagctgtattactcttaaagggagataaagcaatggatttacttcttaaaatgatttttggccaaaggaaggtagcgtgacataaaggaaagtgcacaagatttggagtcagactaaaaacctggaatcggaccatagccctgtgttaaccctggggatgcccttcaacaagtcttctgcacatttctgggtcttatcttccttgtctgtcgatacgggaatagtgcctgcctcaaagggcttagtgagggttacatgaacagtgggctgggagctcacctccctctttatgtcttccccattctcagctactctctgagataattactagttatctttatttttaaaagctggtttggatgttactttctagccctactcgtgctgtgggataaggcaccccctgctgactcccacaccccaaagctcagccctaatgtggcagatcactcatccatcagctggtgccgtgcccttgtgtggggtttggccgatgctttgagtgcctgcaccaccactgcttgcagcctctccagtgacattgctgtccagccaggggtacttcttattcagagcacactgatgttgttgctgtcactccgtctggaagaggcagaaatcctacatttaaaaattgaatcttccaaatgcagccgtatcacagctgtgcagagtgactttatgctctcttgaagcagagcttgaaaatccaattttttcctcttaactgcccgatacagattttgattattactgtctgttgctatcatgagttgtgtctctgggggattgtccgtaaatcatggcagtagttttggatttgcccaagggacagtcatcgtttggactttaataggataaacacaggacaaaagtaaagccattgtctggaagtcaggacattgtagtggagcgtgcactgagtgtgctgcatgtttgggcatgcgagccctgggtcaaatgcttttggatctttccgtttctgcactttgcactctgttgttctgggctacactttcccactgctggtctgctgagtaaactgcttggtgtgggagcagtaagtctcttaagtgccttaagcctactggggcacttttatattccatttgcatgcatttctcgaaccatttatgaagggtcctagcttgtggttgtgtagtggtctccatgagcatatgaaaagccttacctgggtgtgggatctatgcagccgtgcagtggggaagggagagaatgcacagggagcctgctagtggcatgcccgaggcatgtgcagtgtatttgtccctgttcatgctgctgataaagacatacctgagactgggcaatttacaaaagagagaggtttaatgtacagttctgtgtgactggggatgcctcacaattgtggtggaaggcaaggaggagcaagtcacatcttacgtggatggccgcaggcagagagagagagaaagagagagagagagcttgtgcaggggaacttctctttttaaaaccatcagatctcatgagtcttatcactctcatgagaacagcacaggaaagacctgcccccatgattcaattacctcccaccaggtccctcccacaacacgtgggaattcaagataagatctgggtgtggacatagccaaaccatatcatgtggtcagcagtgcggggctcaacttgggacttggttatggaaaggatgctcccctgtgacatgttagtctctggatgtggccttgatagctccactcgcctgacagatgacagcatccagagcctaatttaacccaaaggtgacatctccaggtgggccacactttagcatttcagtaggtgccatgtgttgcagtgctcatggtgcaggaagccatcatctcataattgggtcatgttccgaaagcatgctcggaagtcattacttaacttgctcatctttccccattcaaagcaatgctctgagctgcggttaggtgatgaggcccatccacagaatccttcttaacccttatgaccctggagaaaggggactgtggaccaggacatccccccggggggtggggtcagtggcaatccctcctttcaccctcaagctccttaagtctcaccagctgcagagtaatcccctccccagactgagggagagggcaccctgctctcagcagcagctgttgccaggcaacaaggaaattccgatgtgatgccactcaccaggactgatgggaagtctgcctttcatttctcaccagccacggttccccttcttgggattgtggcatgtcaggtgtgtacaagatggagctgccccaaatggcgtctaagcatcaactcccacattctcatttgagggaatcatttttctgaaaccatgatttgttcctgcgaagttccattacttagggaaacgcagtggctgaattattcattgaggttggtattaaacttctctgtcctcagcattatgctagatgctgtgggggatatgaaagaagtacaagatgtgattcctcttctcaattaactgactatataattagaaaggagtcatgaatatgggctgtgagtcccggtaataagggcctggggtgggactcatctgccttgggcagcctcatgggggctggacaagccctgttttcttccagcactccctttgctccaaggtgttttactactcattagcccaattggactttgtctcaaacttacaatacagcgtgccaccaactttgaatgaaggggatccagattattactgtctattaaggaaatactggtaattcttgtgagatggaaatctcccttaaccctaggaccaagagtgtgtctgggcaggatggagccttttccattacttcactttcacttagaaatgaagacatgttgcccaggtgcagtggctcacatctgtaatcccagcactttgggaggctgaggcgtgaggttcacatgagcccaggaggttaagaccagcctgggcaacatggcgagtccctgtctctactaaaaattagctgtgcatggtggcgtgcacctgtagccccagcaacttgggaggctgtggtgggaggattgcttgagcctgggagttagaggctgcattgagctgtggttgtgctcctgcaccccagcctgtatgacagagtgagaccctgtctcaaaaataaataaataaataaataaataaataaataaataaataaaaaagagtagagtgctcaattcgtcatcctctcctgggatgactgctgccatttgtgctttggactaggcattctgctaagtgctttctacacgtcatgtcagttaattcttacaaccaccttgtgaatcaggcaacactgtacccatggttcagatgagaacactgaggtgaagttacctccccaggccaagtggttgctgcatgctggtggttaggcccacacttgggcgtcttccacgggatctttgggtgctccttttttgtctccctatttttaactcttccctttgtcagctgtacttgttttggagcttattgcctgcatgccttttgtacaatttgatgctgaagttataatggatgtctgtatttcctgattttctacctatagtcacaattagagtttgttttttttttcttcttcagtattaactagagttttgttttttgattctttcttttatggagacagtttctgtagctgaagttggttcatgagcataacggtaaattagatgtactttgttaatggtattttttcgagtaatgggatgttaatataacttcaggtgaaacttgggtaggcatatgtactttcctagagagcttttggatcctgacttcttaccttaaagaatatcttgggccaggcatggtggctcacacttgtaatcccagcactttgggaggctgaggcaggtggatcacctgcgatcaggagttcgagatcagcctggccaacatggtgaaatcctgtctccactaaaactacaaaaaaaattagctgggtgtggtggcgggcgcctgtaatcttagctacttcggaggctgaggcaggaaaatctcttgaacccaggaggcggaggttgcagtgagctgagattgcgccattgcactccagcctgggcagcaagagcgaaacgccatctcaaggaaaaaaaaaaaaaaaagaaaaagaatatcttgatgccttaaacaaaaacatttctggacactgtcttcttccacattgactctttaaaaaccagtatattcattccttgctttttctatataaaatgcaacaaacaaaaacacaaccataacaaccacaaacttctgtggaagcccagacatggtgagggccggaagctcactcagtgcaggcgtgaacctcagtgcaggcgtggtctcagttgtccagagctactgtagctgtggggactcttaaccttgcagtctcagtactttaatttgtgttagttattttatttatattatctataaaaaaatagcagcttgttcttgagcaggagaaacaaaccatttggtatccagtgcctgggcagcgctttctgggtgagcaggcctcttcaggccttgtggtgctctgaaactgccttcctgtagaatggaaagacaagttcttttttagtttcccaaatgcacttttaaagcttctacatggaaatcatttcatggtaaatgtcgttgggaataatgaattcaagtgtactaggtgttaagtatgttgctacaaaggaatggaatatttagcaggtgaatcttttaaaatagggttgatttctctgttcacaaaattttatagagaacctcacataatgcatgattaacagagacagaacagagtttcttgcttgtgaagatctgattgtcattttctgtttccagtggaccttctggggctcttgaaatggcgctccaacaccagcctgctgcagcagaacttgaggcagctgatgaaagtcgatggtggtgaagtagtgaaggtaacatggagcccaaagggactttttgggtctttttttttttttttttttaatgtatgttaacagaagtaggcagtgacttcaaaggtagtataggattgtggttatactccctttaaaaaatagtgacatagggattgggtgcggtggcttacgcctgtaatctcagcactttgggaggccgaggtgggtggatcacctgaggtcaggagttcaagaccaccctgaccaacatggagaaaccccgtctctactaaaaatacaaaattagccgggtgtggtggcgcatgcctgtaatcccagctactcgggaggctgaggcaggagaattgcttgaacccaggaggcggaggttgcagtgagttgagatcgcaccattgcactccagcctgggcaacaagagcaaaactccgtctcaaaaaaacaaaacaaaaaaatagtgacatacacctctaggtgcacagagtgcttcttggcttctggtttggggggactctctgggttagccgtgaaggggactggctttgcaatcaacctcatcgtgggttctgcgtcctcttcccataggtcctcactacaggactcacaacagttcagtgacctctttaagcctctctttcccctgccatgagaagtggggtaacagtagtgccttctgcagggtcgttgtggagcctcaggtctttttactgttgtcatgatccttgttactgccatcagcattcgtactagactccctgagatcccctttaagtgaccaggagaggtctgtggtgtggtagaaagatcacgacactgagaggcttgcctgggccgtcttcttcccacgggacgctctgcagcagtgtcgggtataattattcattcagacccttgtggcctcagcatctttatctgtgagagagggcagtcagattacatggccggaggtcctgggagcactcagcttctggaattctttactctgtaattgtttgtggttctgatgttttctgcagtattaggctcttctctgctctcagataccccacaatttgctggggcaacttttccttgtacgtgaggaagcgaatttccatttttagtcgattctgtttttggctatgggacgataagggggtcactggcatgtggcgttctataagcatagactctccagcaaggtctgtgtgttgccgcctcagttcctcactctctaggagaggtgattgcagaaagagacgaccttatctctgtaaaaactaattacttaaaatggccttaattaaccagcagtgtgcttcacttcagtatcaattaatttggtcgcaccagtttcctgaatcgtataactcttcagacatatactcactaatcttaaaattttaatcatcttctcagtcctggtgttctcccaatggcttggacaatgttaattgcattttaaacttccctgtgttctgtaaattccctaattcaggtggaaactaggtgaaatacatgaacgtagttgagaagaatccagttaatgaaattttgtcctctttcattttgaagtccctgtatcatattaggaatgagttgtatttctggcgaccagttaccacagttacctggaagaatgtagaatgatcttgtcccgtcattctcccccattcccctcatctcatagattctcacatttgattattcatccctagacatggcctttacacctttcctttcttcctgtgcgtgctggtaccacgcaagcctgggtgacctgtccagcccttacctaccttgcctaactttgtgctttttctctgctggcgtgtctgacatgcgccgtgagcctagagagtggaactgacttgaggccacggggctgttaatggccagccaggacttgaggaattcctgcctgcacggggctccttttgctgatagggatgctgatagattgtgggtttggttccatttattcaggacctcccttctgagtattgatgactgatagcagagagatggcattgcttggtagattgaggaaggtatttgtgtatttagcaaaagatacgctgtcccattagatggaaaatggaaatggtgactttggtgcccttgaacatggtcttagagagagggtggggtgccagatgaagccctttcatggctccgtgtgaaggccctccttcaggtgctcgcccctgccccactgcagctccgcagcccaatacgtgcagctccatctccctgtggttctgtttctgtgccactgaccatgtcatgtgtctgggtgggaccaggtggtctacttcagggactttgcatgaaccgtgacaggccaggtcctgccacctgggagcctgttggcagggaaatattcggctgttagcagatggcatcaagttttgaccttcgcaaagaatctacattctgaaaatgatgggaaatggtgcaaaagtaacaaagtggtacagatccacatagttaggagttgattaatcccttgacatccagaccagcatgccttttggtcaggttggttttgtttcccactgtttgcatgtgacattttctggtataaagtaagtggtggctggcacagccaagcatggagaggattttactccttaaagggtctctgatctcatgctgggcatgctgggcgtcctctctcccaaaggaaacggatgaggctcatgctgggcatgctggacatcctctctcccgaaggaggcgggcgaggctgttgctgctgctgtggttccacagcactcctttgcgagcaggagtttgtggtttgcttctttaatcttggggctatagcagtttgagatcttccatgccatcccaaaagccccctgggtgttgggaagaggctgcacagtccaggaggaatctgaaccaaacacctgacccagcctttcctctgatgtccttgctgtgtgatcacctcacccatttatttttatttttctttaaattacagtttcattgagatataattcacataccaaaaaattcatccttttactctgaagtttttagtgtcttcatggagttgtacaactattaccactgtctaatttcagaacactttcatcatcccaaaagaaaccacatagctattagtagtcactttctcctcttcctgtaaccactaatctgcttcctgtctcgatggatttacctgttctggatattttatgtaaattgaatcatacgccctgtggccttttgtgtctggcttctctcacttagccttgtgtcttcaaggtttattcatgccgtagtgactatcagtgcttcacacctttttttgttttgagatgaagttgtgctcttgttggccaggctggagtgcaaaggcgcaatctcaggatcttggctcaccacaacctccacctcccaggttcaactgattctcctgcctcagcctcccaagtagctgggattacaagcgtgtgccaccatgcccggctagttttgtatttttagtagagatgggggtttctccatgttggtcaggctggtctcgaactcccgacctcaggtgatccggcctcctcagcctcccaaagtgctgagattacagatgtgagccactgcacctggcctgcttttatgcctttttatggccgataacattccatcacatggatagaccgcagattgtctttccattcattagttgacacacatttgtattgattctgcttttttggagatgatgaataatatttgtgtacaagttattttgtgaacatatgtttcctttcttttggagagatggccaggaatgaaactgttgactcatatggtaaatctgtgtttaagtttttgaggaattgtcaaacagtttttcatagcaattgcacaattgtacatttctaccagcagtgtgcaaggtctccaatttctctgcgttcttgcccacttcttattagtcatcttaaattgtagcccagatagtgggtgtgaagtgatagctcatgatggtttccctttgtatgtccctaatgagtaatcatgatagatcagtacttcatcatgtttatggccagtatttcgttgtgtggcgttctgcctcttcttgaccttctcttctaatacgaatcatcacttccaacaccgtgatcttcagtccgtcttacatttcctgcaggggaggatggggtgggacttgaagctgacttgtagtgtgacatgcctttgaagtctcttcctaattacatgtatgatgctttgtccttctttgcagtagtatttatttggtaaattttagtcaactgtaactgtaatttcgacattgttgttgaataaagtaagcaccttctggtctcaaaactgggatactgctgtgtattccagtttcagaatcacgatcctcttccatgcctgggcaccctggttggtagaaggtccttccttccactcagctgggtcctgtccctgtgtggcttctgcccattcactagctgaagtcctgtacccagtgtgtagaatgagtgagatgcatcttcccagagttgccattcagcgctttgtcaccagccttatgaaaaccggaaagagggttggaaaggccccctgggggaagcagtaggccctctccttgctttgaccctctccatttaacactggtggcatttctttgttctgaattcgctcatccaaaatttttgtcttgtgtatctagtggctgaaaaggatcccgaatggctttataggtagtgctgggggcaaagtgggtatttggagtactgcagagatgatagttattccagtgtgtgggggaagtccggtgggttcacattgtcacccgaccttctgtgtctatgcagtttcttcaggacacgttggatgccctcttcaacatcatgatggagaactcagagagtgagacttttgacacgttagtctttgatgctctggtaagagagctttccttctcatatgcttggataacacagcgttcttccatgctgcagcgtctgaggctggagtcgggggcttcgtcacagtgaccttgaacgcattttcagttgtaaatccaatcagagatgaattggggtggcagattttttttctcttttttttaaatgtaaaactgtagttaggcaaatgtcatttctagggtaagaaaaggtaaactagccaccaacttctatctgaaaatgttatggttcatatcctaacacaggggtgcagatggttctgatgaagattataaaatggcttacattatgttgctaatgaaaatattattgattaatttgacaggtatttatcattggactgattgctgatagaaaatttcagcattttaatcctgttttggaaacttacattaagaaacactttagtgcaacgttagcctacacgtaagttcctactttgttttaaaaccaatacttctttttttggtatttgtgttatttagagtctttttcatgtacttttgtctatgactgtgtatttactcctgctcaaaactctgagtttactggaataatttttagtattgtttccctcttaacatacctaaaaaccttgttgaaagagatatgtgataaatcatcgtaatattctggaataaattcttgttctccctcacaccttccatttatctttgaaatcttcactttatgttcgatgaaactgagctttggatgcggagtgtctgacaccgcggcttcctcgcgagcctttgatgaatggataaatgcatgtgttcccgtgttaaggagattggttgtttagtgtgaattagatgcagttttgtactttgcaatgtatctccttgctctttaaagagcaccttcccttttctttgacaagcttcagctgtcactgtcttggattccttctatccacccctctgcccgtctgtgccccagaggtctaggaagacaccagaggctatgcatggtgcctgggccagcttagcagtgtgcctggtattgaagagcagagccctggagtctggagtcaggctgcctgggcttgatgtgcagctctgtccctcacaagctctgtgatcttgggcaagttgcttaacctctctgtacctcagccttcttgtctgtaatcagagcatgattgtaggcttgtgtggaaattttaataagttattacgtgtagagtgcttggactaatccctggcacttagaaagcactaagcaattattgggtttcattatcattagatttattatgatgacttaccggctctttcttggtggaatttattggcatttattcagactttttattgtgtgagttacagcaaaacataaagatttacataatttctttaagaacatcccgcttagaatcagtagaaaggattctttttagtgtgagtaaatttagttaaaactcccttctgtgtcttcaacatactttgcaaaatacctgtttttcctccctgtgtgcagtcatgaactcaggtcagaggactctggcctcctgaagccagctgttaatataccctggtcctgcacctggattctttcatatctgcctcgtgtgcgtgtttactgtaaggtggtgggtggagctccaggaaggctaagagctgtgaggtcctcaagcctgcggaacaagctgtgactagttctttgcacttgcttgctaataaacgtttgtttaaaacattttgttcgctgagtggagatgcccagtgtgtgggcatgtcgagtagttccttacagaccgtggggagggtgcattgcagggcacttttcctggctcttgtgaccaaaacaggagcttgtggggtttgcggaagtggcctgtggactgcagcaaacgtagcacggcctccacgtgtgctcattttcaaaattctgccttttgattgaaatgtggccaaagaactcttctcagattaggctccgtgcttgaatttcagaagatgagaggcatgaatcagcttaccacactgcagccacatctcttcattggcgccagcctttccatgctgtgctgttggggaaggagtgatgcagccattctcataggtggagaaagaaaaatgggagattttgatgagtttcctaatgagacaaacaaaaagtaccattttttctttatgctgtgatgggactgagataagaatagtatcctcatggccgggtggagtggctcacacctgtaatcccagcactttggaaggccgaggtgggtggatcccatgaggccaggagttggagaccagtctggccaacatggagaaacccccatctctactaaaaatgcaaaaattagctgcgcgtggtggcacgtgcctgtagtcccagctacttgggaggctgaggcaggagaatcacttgaacccgggaggcggaggttgcagtgagccgagatcgtgccattgcactccagcctgggctacagatcaagactctgtctcaataaaaaaaaaaaaaaaaaaaaaaaaaggatcctgtcattcaatctatggaatctgctgaaaaagaaatttttattgtggaaaataagtattgttagcatgttttggtaaactggcaacctcacgtggttcctcagcagcctgaatttgcatgtctgcaccttgaaattccaaaggagtcagtggcgactgagatagctctgaccacatcatggaaggtcgcctccgcattggtgatatgcttacagtattctctgggccaggcgaaattccagtaatattatcccagagtgtccttgtcctcttctcctctagaaggctttggtaggtacaggcttactttagactcttgtccatgtagcctctctcctttggtaaatgttgagatctttagcccttcttcccaacaacaccaagagaaggaatgaaagattttggcaatgggcagtcctcttccgcacctcgagctgtgtctgcggctcccctgcgtgggtagttcatggatgctggagccccactggactgaccagcactggtacaagtgagaatgaagggaggcatcggctttgggggctgctcttccataaaaccagcatgactgggctcctttttgtccaccctatggagctgctgcaggctcctcactggcaactgatgctccatctgctccgccccctctagccagtgccaaggggttgctttttgtgcaggtataagatggcctggcagatttatttttatttattttctttttgctgtctaattccaggttaagattcatttgctggttctaggtccttcttttatttattttctttctttttgctgtctaattccaggttaagatacatttgttggttctaagtccttctctttgcaaatcattattatttttctttttttaattggtttgaagaattcccaaaatgtgttctatggaatgtttattccctgggatattaatatatgtaataagaggtgcgtggtccagtaagtttgggaaaataagtaaaactgagtgaagcaggcttcatgccagggtgttgcatgctctcttgtgcagtgagcaccacccgcagaggcctatatggcaaggtgtgttttccagccaatggagatggacaccgtagcaggaggatctgcagacttcgcctcttcagaacagcgagcaggagtgtgactctgagagcatcagggctccctactagagctctggtgcctgatcggtgttagaaatggcttcacatccactcagtctcccaaaaagcttttcaggccatgcatggtggctcacacctgtaatccttgcactttgggaggctgaggtgggcggatcatttgaggtcaggagttcaataccagcctggccaacatggtgaaaccccatccctactaaaaaataaaacccaaaaagttagccttgtgtggtggcaggtgcctgtaatcccagctaatcagaaggctgaggtaggagaatcgcttgaacctgggaggcagaggttgcagtgagcagagatcacagcactgcactccagcctgggcagagcgacactacgtctcaaaaaaaaaaaaaaaaaaaaaaagattttcattgtgatgtattggtaaaataggtactcttagctcatccataattgcagtgaaggttgctcttctgagtgtcttattccataacctgagtgagcagtctggcctttactggctcacaactgaaccagacatgctgtcagtaccccagcagattgcttttatgaacataaaaatctttcatgtggcttttaaaaagcctcagtgaattttgttggatgcgtaagatgttggtgactggagaagtttgggtggcggatattcttcctggtgtcttactggctgcacgcatggtgctagtttttggagagttgcagtgcagctcagtacattaaaaaatgaccgtgtgttgttgttaattcagttgttcttttattatgtgtaagctattgcttgagggtcatccttatgaacaagattattatttgatgagtcagtaatggttgaaagtgtagaagtgtggatagaattaaaaatggcagatcctcactactgcctctatcatttaaaaataacacatgctcaacggataaaaaatagtaaagaaatctcacattactcaaatgttatagtgcagacgataaaagttcccttgtatataatgctacatattggagatatctactgtgccagcatttattttctatgtttatattaacattgttattaagattatgactaatatgtctgcatattttacaaaacagcattgttatttttgcttgcttaaaatttaaaaacttaaaaattgttataatttgcatacaacaaaatgctcattttaattttgtttggacggtttttgtatacccttggaactactgcccaaaacaagacataagacattgccattccccacaaacatccctcttggcctatctgagcccatcccactcccagacaagcagccactctgtggtttctgttaggaatgtgttttgcctgttcttaaactttacaccagtggggtcatgcactctttttgtatctggcttcttcccttccacataattctcttgagattcatgcatgttgctttgtgcatcattaaatatttgattttgctcctctctatttctgagcagtattttattgtatgaatatttcatgatttgtttagccattttcttgttgatggatacatgaagtgtttctagtttttggctattccgaataaggctgcgatgaatattcttgtccaagtctttggtgaagtttgtttttgtttcccttggataagcacctagcggtagaattgccgggctaaaggatacgtgtatagttttctttgtaagatattgcgagacagttctccaaaagggttgtaccatattgcattcccaccagcaatctgtgaatgttcttttgctctgtatcctcatcaacatttagtagtgtctgactttgtagctattgtactgggggcaaaattatatctcttggtgattttaatttgcagttactggataactgatgatactgagtacctgtttattttattttgatttgccatttgtgaaatgtctgttcaaatctctttttcattttatattttgttgtctgtttcttattgatgtttatggtatgtgtgtgtatgtgtttgtgtgtttatacacataaatatatgtatttttttttgtcagacatgatttttgaacattttcttcctgcctctgtttatcccttttcttaatggtgtctttcgatgagcagaaatcttttattttgttgaagcctaaatcatcatttaaaaaaacagatagggattttcattttgtggctaaacaatctttgcctagccaaaggtcttaacaatgcctgcactgtctaatgtcacagcactagcctcgtgtggctatttaaataaaattaaactaaacaattacttccgcagttgtgccaggtgtgtttcaagtgctgagccaggttggacagctcagaaacaggtttccatcactgtagaaagttctgttgggcatcactgtttcagaagctttatgctttatgcttttgacagaattcagcatctgtttatgataaaacctcttggcaaactaggaatagatgggaagttccttgatctgataaagctcatctacgaaaagtcatagctaaccttatacataatgctggaacatggaaagcttttcctgtaagttcaggaacaaacgtggctgtctcttcttactatatctgtttattattgcgctggaagtagtaaagcaagaagaaataaatgcgggtataacaattggaaagaaaaactgtattttcacgttgattttgtatataaaaagccctcctgaatctattttataatttattttaaaacaaacataaaaggaaacttcaattgtatatatacacataattgagagggaattaaaagtacagtagaattacagtatggtacagtacagtacactttagggtcttatcaaaaagtcataggccgggcatggtggctcatgcctataatcccaacactttgggagggaggcctaggtgggtggatcagttgagttcaggagtttgagaccagcctgaccaacatggtgaaaccccatctctactgaaaatacaaaaattcgccaagtgtggtggtgggcacctgtaatcccagctacttgggaggctgaggcagtagaatctcgtgaacttgggagggagaggttgcagtgagccacgatcacgctactgcacgccagcctgagtgacagagtgagactctgtctcaaaaataaataaataaaataatgagggataaatttactggtagatgactgaaaattgcaaaatttgctaagagaaatataaaaagtaaataatttgataatatataccatgttcatgtattgaaaaataaaatattgcttgaatgtttatttcaaattatagtttgaacacagtctcaatgaaaattctgtatgcttttgtgaaaaaaaaatggactaatttgaatatttatactttcaaaaagtctaaaataccgaaataatattttagaagatcaaaatttcaagatttattattaaacatcagtaaccaagatagcatggtattggcataaggacagacaaaaagttcagaaggagagaatataaaatacagaacagattcacaatagaccttcgattttgtaactgctgttttcttttaacagcataatgacaaaactggcctctttttttttttttttttttttttactatagtgatgagggagtgcccacctagtgtattgaactgctgtgcagtatttcattgtagggatgtattaccatttattgaaccggctctcagaggttgggcatttgcattgtttatgtatttttactagtcagatcatgcggcagtaaacatcatttgattcatttgtaattgtttctgtaggacagttactagagttggaattcctggtgtcaaaggatttgaatatccttaattataatagatatttccaatataatagatatttccaatatccttaattataatagatatttccaaatataacagatatttccttaattataatagatatttcttaattataatagattttccaactattatatataatagatatttccaatagatattataatacatattgccactttaccctctaaaaaatttttatgccctgctgggtgcagtggctcacaccggtaatcccagcacttggggaggctgaggtgggtggatcacgaggtcaggagttcgagaccagcctggccaatatggtgaaaccctgtctctactaaaaatacaaaacttagctgggcgtggtggtgtgcatctgtagctgtgtgggaggctgaggcaggagaatcgctggaacctgggaggtggaggtttcagtgagctgagatcgtgccactgcactcccgcctgggcaacagagcaagactctgtctgaaaaaaaaaaaaaaaagttttatgcccatttatccaacagcagtgttatgataccccaaagtttgtctgtactaggcagaaattttatttaattttcatgtgtttattaatgaagttgattaatatatttctagattttaaaaaattaagcttctcacattccctaaaactttgagtagatctattatcatttgaactttcttgttatttgaattacagtaaagtaaaaataatttaatacatttcccttcatctttagcaaggaattaaaaaaacctatctatgaattaaacactgaaaatatttatgaagccatgaattaatattaagctcctaatatatagtttatttataccaactgtctataattacttctgtagtaggatgaaaaatttacaaataattttactcaatttttgtgtattccaaagtgtgtaaacttttttatcatggaaaagattttaaatgttttcatattaggatgttacttgattttagatcccaatttataaataaacagactaagagtatagtagtcattgtgtttttaaaactaaatgtttttggggaatcttattaggaaatgtcaatattttaaaatcttcatgtgtccactgatagtattcttactattcttatatattgtttatagtcttctctataaggatttttacaatattattaaaaatttaagactgcttcctatttgaaagaccatttgtaaattttaattttcggtgtaagaactctagttttagaaaatcaactaaaatgaataaaagtgtctgagatgctttccaataacaaatactgtttcatgcctttaaaaaaattgttgtaaaatacacataacataaaattcaccgaatcattttattttattttatgattttttgagacaaggtttcactcttgtcgtccatgctggagtgcagtagcgcgatcttggctcactgcaacctctgcttcctggactcaagtgattctcttgcctcagcctcttgagtagctaggactacagccatatgccatcctacccggctaatttttgtattttttctggaggcagggtttcattttgttgtccaggctggtctcaaactcctgagttgaagtgattcacctgccttggcctcccaaagtgctgggattccaggtgtgagcaagagcacctggcccctacctaatagttttaaagtgcaatgttgagaaaatcgtcaccactatccatcagagagtatttttggtgtcatgcctttatgaaaaaaatttttgtgtctctgtttggctgtaatgaaaatctcttcgattttattgtttaaccttggggaagctagtgttttacctgtggaagtcctggtttcctcatccattaaataggataatactgcctcatagtgttgctgtgaaggctaagttagataatgcatttcacctgcttagaacaacgtctacacttagaaagggcttattaaatgctcagcctttgctctcagaggtattttatcaggcacatttactgattagaaaacgttttacaggccgtgcagtggcttacgcctatgatcctaacactttgggaggccaaggggggtggattgcctgagctcaggagtttgagaccagcccgggcaaatggtgagctcctgtctctactaaaatacaaaaaattagctgggcgaggcggcgtgtgcctataattccaactacttgggaggcggaggcaggagaatcacttgagcccggaaggcagaggttgcagtgagccgagattgcaccattgcactccatcctgggtgacagggtgaaactgtctcaaacaaaaaaaaaaaaaaagagaaaacgttttacagatattcatatactgatagatggaaaccaaataaaagtaacctacttgtatatttccttagcagttaagatttgagatattttcctttcctgagcttatttgtgcgtgtttgcattgtgaataggaagttgacaaaagtgttgaagaactacgtggacggtgctgagaagccgggagtaaatgagcagctgtacaaagccatgaaagcgctagaatccatcttcaagttcatcgtgcgctccaggatcctgttcaatcagtgcgtacctatcccctccatgcccgggctctcagaggactggcaggagatccttcacttctttccttccccttctctcgtccccttattctttcctttcttcttccccctttttcccccttgctttctaggctgagagagcactgttgatcctggggtgagctgcccactctttccttacccgcctgggtccctgccggtgctgaggcgggagccctgttcctggtctgagatgtgtgcctgtgagtcgagccttggctcctgaaagcattggcgatgacgcaggtgcaatcctgggcgtctactgagggctcagaagcccttttcaggatatctttatatggcaaaaagtcccaaaagaaaaacaacaacaaaaataggccgggcgcagtggctcacgcctgtaatcccagctacttgggaggctgaggcaggagaagggcgtgaacccgggaggcggagcttgcagcgagcggagatcgcgccactgcactccagcctgggcgacagagcgagactccatctcaaaaacaaaataaataaataaaacaacaatgaaaaggcaaaaccaagtgaaattgcctcacttgggcagactctgggatttcctcctcctcttttcctcagtagagtgatgtttcatttcgggagaactcttcctacatagggtatttccgtgaggaaggatactcaggtgctttagcctagtgacagttttcacacgctgtgtggatgaacttatgaatgatttttgagctttaaagtaaatcgaagggttaaaggggaacaaaaaatgtatttattaccattgaactgtatacttaaaatggtaaagatggtgaattatatatatgtatattttgcctcaataaaatacataaattgggatatttatggcttattttatagagagccttaatattgtatagatacagatgcaggttaagagctgcgctaaaatgaggactttctaagttggcccacgcctcttcactgtatgattcaaaagatgtgaaaagtaagtgtgttgagggtggggtgtggaatttcactccctctgcttgtttttttgggggatggctattttgtgggtgacctgccatgagtgatgtcaatggatgttggtggttctacgttgttattgttcttgttgtgagttccacacacagatgggattcatgaacctgtgtccctctgaattagcgaatacatttgcctttgaaaagcatggtgcccttgtaacctattaacgagaataaggaattgaaagtgtgggcccacatcagtgccttcccgtttcctcctcactgtgttttcgtttgtctgaagcagtcgtgtccagaagaaggactcaggagaagggggaagaattcaaaatctaaccatgtgtctaccatgatagtaataaggacaaagcaacaagttattgactgtgtgttgacctatcagagtcataaacagggtggtaaccactagtgatgtgttactggtcagggactggagtgtgcttctgttcactctggcgtgtccatggtcaaaaccacagtcctcgtgctgccatttttgcatacaaatatggcatgtttgagggcatcatggttttgtccttgacttagatattacactcttttattttgcttattatggatatgcatgacctttggtgtggattgaagctttccctcaaggatctaagttgtgatttattttctctttgttagggtgaaacacagcatggtaagctaggttatgttttcttgtattttaattctatttcagtaaagttaattctatgaaaatgaacttcctggccccccctgccttgctgttatattttcctcactgattttaaatctctgattatgctaaacccaagtcagtactagggtgggaggatgaacttgaaagatgttacagatttttgtcatgttttatttgaaaaatgttaattttgtgcagtttgtgatcaatatgacattgactcaggcatttgatgatctgcatattctcacccgataacactggactttccctttcattcagaggtttgtacttaaaacgatcgtgcattgataatggtgtttctgctatagtagtaaatgctatagtcttttatacaataatgctgctttagaaaagattgagttacccaggttgaccagtagcaaattatttctctgcctcgttctttaatctctttcaatttcaaaatacaaatggcacaaaatcttagattcatggtccataattttttttttcgtttgatcagtctaatagtgcttaggaatatgattggctgcatgtaatagaaaaacaccatttatgtgacttaaccatatggggttcactttttttttttagtcacataatgtgcagcccggaggaagagttccgagttcatgcacctgcgtgaggactcagcgtcctgatgtccttggctcctttgatctctctgccccaccatccttagtggggtctctttatctcctaatcctaagatggcttctgcccctcccagcatcagctctgcattccaggtggaggagaggggaaggcaaaggagaaacagctgtgccagctattcttctttgaaagagctttcctcatccctagaaagtgtcatgtgctttcatcttattggccagaaccatgtcacatgaccaccctacctgcaaggaagctggaaaggatttttagatgggctggttgatgctttctacaataccagagtgattttagtaaaggagttagggagaaatagataatggatgggcagttaacattctcttcctcataccttcaacccagatggtctgttccctgagagcttccctaactcattctgggttactaaatcctacttaactaggttttgcagagcctttcttctccattagtttgggagtcaatctctgagacttctgtcaccagtatctctttggctttaagtatctctttaggccctaagtgatccactggcatggtttagtcctaccaggttacatagaaatggactgaagtactcagctgctcctcgtgtttgggacaggaagtgtttagtgctaaagtcctctgaatgcctgcattctggtgctcaacagcatggcacagaacatgatcgctctacctgcctttgtcctggtatggacccagcaggagccaggcatggtccacaaactgagtttctttgctggtataacttgtttgttagaagagttgagactgttgaggacacaaagtggtcacaagacaagttgtagcaattgttacaacttagtgaggctccctaagcctctgaggccattgtctgggcattcctgactttagctaaccgagtactgcagtgattctggagatcctgatgctgctgctgctgctcctgatcatgatgatgatgatgatgatttgagacaggacctccctctgtcactcaggatggagtactgtgatgcagtcataggtcactgcagcctcaaacccctgggctcaagccatcctcctgccttagtctcccaagtaactaggactacaggcaggtgccagcatgcctggctaattttttgtaggacatggtctcgctatgttgcccaggctggtctcaaactcctggcctgaagccatcctcctgctgtggcctcccaaagtgccaggattccaggcatgagcccctgtaccccactgattctggggatgttgatactcatgttccttctctccctccctcttttcctcccttcttccctagcttcttccttctctcctcgcttcgttctttcctctctccttccctccttttttctctcttttgtcccttccttccttccttccatgaatacttaatgagtgtatgagccccaagtgtatcccagactttcacagtttgactttattattttttctctgaacgtttcctgaatgtggatcctggctgcctaccctcattcctgaggggagagaaggacataacgttctttgagatgtggagcacctagccgcattgtgcagagacaacaaatacttcaatttaaatctgtgttctaaaatggctgagaagatatttcatagattttatgagaggaaaaaacccatgcccttagaatattggacggtagggcagaagtcttctagtaatccctccccttctgtcctccccatcccacccctgctccccatcatcccaccacagcatgtcagttgttacttcatctgtgctatcacaggtctgaaatgtagctgaaatcgttttcctagcttgtataggctacttaaaggaaaaagagccccacgtcccacacagatatctaggatgtttgatccgtgacaagctccaaatgagtctcctgtgtggtgctgtcagaggtggggaagaaaacaaactaggactctcatcttcttacctgcagcatgtttattaccttgagagaaaaacaattgtgctcacagctggaattcatgagtgtgttttcctttttgcagctgggataaacttttgagatcttatttttctttggctttcaaaatggtctattgtgttttcctatagtgcaatagctttgttaaattccagtataattgacagtaattattcttccaaagaacaaagaggtgaaactttgaagatgaagatattgaagcttatgttgttaacttactatctttcttgctatgcagtctcatattttttgttttgtttagaaagctcattttgttttgaaatgagaacaacagtttaaaagctatggcccaaagacatttggttcctggggaacccactgaaagattcctgacagccgggggcacttctctactggtttttgtttgtctgtgttttctgtgtgggtggatcacattaactagaaagccagaaaacagatattctgcatcagaatcaaattactaaatctagttattgcctgccttctcttctgggtttcttgtgctttgtagagtttttgcctgtcatctggtgttagctttgtaaataattagttattgatcatgaataagttgtacagacctttttgctatcattccctgggtcacaaaatagaatgtagttaatagacaaagatcctgtcattccttgttaatgaacacttatttaagtagagcaaggaatgagcaggtcttattcatctgtttatttatcgataagtttctgagttgttttttctcagttttttatccacttcagggtggatcaaaaaagtggttctccctggtttatctgggaaaatgaaaagggaagattctagagactttaacagtgatcttttgttacagaaagatgcttcaaaaggatcacggcaaaatgctatgttctaaacatgttggttggcacaagagaaactgttttacatttttactcatgagaggttctggtagaatttaaaaaatattaaagattcattaatcatgccttatagattttgaagctgtgttattgggggcatacagatttataatcatgatatctttcctgttggtctattccttaatcaatatgaaaagtttctcttaatcttttggctagtatttgcatggaatacctatttccatccttttattttcatgctttctgtgtctttatacttaaggtgtgcctcttataatacaacatatagttgtatttttctttcatccagtctgacaagcttcttaattgagcatttcatccatttatatatagtgtaattaagtaatgttagatttatatattatttttgcattaattttcccttccccatctgtattattttccccttttcctccttttttgccttcttttataccagttacactttttttaagcatctcattttctgatttttaaacatattatttgaatattcttttactattatttttaacaattattctagagatggtaacatccatgttggacttattttagagtatttcaaatgattactcttaccaatccactgataatgctagatatggccagaaaaatagcacgctggaattgccattttcttctcctctgttttatattattattgtatttcaattctatgttttatattccataagacattactgttattttatacagttagtattcatttgatgtgttttatgtttgtaattgtttttcatccttcaatttcacttttcctttgggatcattttctttctgtccaaagaactcacttgtattatttcttttagtgttggccagttatgggactctgtttgtatgaaaatgatttatttcatctttgtgtttgaaagatattttcactcactatagcattctaggttggaagttattttcttcttccatgtattctattctattttgatttccttcatttatagtaagtcattagctttcagacttactgttacatctttgaatttaaatggtattattttctttcttgctgcttttagtttgtctccttttctgtggttattgacaatcttactatgggttgcataggattgtttttgctttttatttatcctgcattgaatttctgaattttttgattgatatctttgatcagttttggaagatttgtggccattgtctgttctaatgttacttttgtctcattatcttcctccttttctcctggcacttcaattacatgtatgttagatctcctcaatatgcctgcacattcctagccctcttctgtattctcttcctcagtacttctgtttagttattttctgtggattgtcttccattttactaattctgcctcttgctgtgtctactctctattttgttaatccatctaataaatttttaattttagagagtatattttgtagttttagaatttccagttgattttttcatagattcatttctctactgaaatttttctcttaccttctatttgtcatttttttatcttattttccctgttctcaaatatgattatagttgttttgatgttctaggaaattgtaatatctagattatctgtggggctgtttctgctctctttttcctctttcacttggactgtggtctggttttctgctgagtttaataatttttgtttgaagtcaagactgtttgtatgtaaaactgtagaagcttcagatgatgtgatcttcttccagagataattcatcctgccttcttctagacaaagtggggctgaccatcttattttaatcagagactgtgctcagttttgaggctacactggacctttagtatgcctcagtctccatttactgtgcctctggctttctaggattttcatctgagagtcggctctgttacctggggactctctccctggcgttttccaaactcgagtcattttctctgatgattggtgcaaattccactttgctttatagaggttttcgttttggtttttagtcttctatcccatacaggtctaggaattacagatgtcctgaggggaaaaatgattgcagcttgatggctcccgaagggttgcaccagtctaccaggtgttcttcatgccacttgcaagcagaagttcatgattccatcattttaattgtttggtacatcatttaagcaaaccccatttgaaaacccttatttacaaaacagatccactaggttgcaatttcccattttacacagaatttgttgctttacagtggaattcatttaaatatcagactacctctagggtaattaattatcacttagtttacaaaattttccattgtacacaagttttcaggtatcgtatatttttaattaggcagcaaactagtattagtaaacactgtattaataaaacatctgagtcacaatattttaaaatgcaaatgtgttgctttttagtaacacagcaacttgaagtaactgctaataaataatttacaaacgagacttattttcaattagtaacatatattagcatacatgtaaccaatgcacaacttccttattacctatttattgaatatgtcccacctcttgaatacttttcagttaccactgatgttgaaatgaatgcgtttgtaaagcaccattactctggaataaaaaagcaactcttgtgatatcattttaaaggattagaagatcatggtaaatttaggcaatggagtgtgttgttgattttcaatttgtgacataatgggtttaaaaacattggtagtggccgcctggcggctcacgcctgtaatcccagcactttgggaggccgaggcaagtggatcaccttaggtcaggagttcaagaccagcctggccaacatggtgtaacttcttccctactaaaatataaaaattagctgggcatggtggtggccacctgtaatcccacctacttgggaggttgaggcaggataattgcttgaacccaggaagcggtggttgcagtgagccgagatcatgccattgcactccagcctgggtgacaagagcaagactccattacaaaaataaataaataaaataaaaataaaaacactggtagaaaacacaactgcatcttaatagtgtaatttttgtggggtagaaataaagctgaatttccccatcctctttccctccttctcttcctcggccctttccaccctccctttctgtatattttctgtgtttttcagatttataagatgtagtatgttacaatgaaaaatgcagtgagtggtagcattaagggtcagcctctgtatgtggaggcacgctgccttggctgagtggtctgcatgagtctcactgccaagttaccttccttgcttcatagatgttgaggatgtggtctctcattctaacttgtcacccaagtgattcccttcatggctatagacatggattcaaaaaatgttgaggtgtttctgccaggcccccacagtttgtgtgtttctttgcagactgtatgaaaacaagggagaggctgacttcgtggaatctttgctgcagctcttcaggtccatcaatgacatgatgagcagcatgtcagaccagaccgtccgggtgaaggtgagtgccggccactgccaaggcagacttctccttctttttttctttcattatctcttttggaggtaggtattttgattacagttaattaacttgccccaaataccatagttgttaatgtcagagatctcaatttgatttcaagagctgtgctttttttttttttttttttttttttgagacagaatcctgctctgttgcccatgctggagtgcagtggtgtgatctcagctcactgcaacctctgcctcccggcttgaagcaattctcctgtctcagcctcccgaattgctgggactacaggcgcatgccaccatgcctggcaaatttttttgtatttttagtagagatggggtttcaccatattggtcaggctggtctccaattcctgacctcaggtgacccacccacctcagcctcccaaagtgctgggattataggcgtgagccactgtgcccggcctttttttaattttaattttatttttagatgacacataaaaactgtacatatttatgggacatacgctgatatttcagtacaggtatacgatgtgatcaaatcagggtaattagcatagcatcaccttgaacatttttcatttctttttgctgtgaacattcagaatcctttctacttgctttttgaacatatacactaaattattgttgaccgtcttcactctgcattgctacagaacactggactttattcttcttatctagctgtagctttgtatcaaagtggacttgtagatgaagggcttcctgtggctgagctaaggggctgtgggccctgccaagcctgaactcgagggaaaggccccggagcctcttttgtagtgaacataatcatgctccatgtgtagtgaaatcccttcttcctcctccctaggtgctcttaaatattttcattgcttctctctttgctgtttggcaagacagattctgaattcactttatttaaatttgggggaattgatgagaatcatgttttacacctaatttctcagggtgtccatgccctggaaagggtggtgaaccttcatgcttcagtggatctttgcctgtgcagaagagcgagccttccagtgcccctgtccttctgtccttcttccctcttttgatgacctggtctcaccctgttgtcctttggaagaaagatcccttccactcacatgaggcctgagtgttctttaggatgctcactggtgtggaagtgcctgggaggcccatggagcagccgcaggacccccacaatcttggttatcctagttatggcggttttcactgggctgacttattgcagaaggagctgtacaacttgcaatttgctgcctgcactaattccttcaaagaacaagaatcttccaaatgattagcttacatctttcactcgactgatcatggtagacgcctctgttcttcctcttttaatgtttgtttaacgtataattttagaaggcattcttatggctagtgtcttaaaaatattttggtcaagtcgcttcccagccttaaagctttgccatatgccctggaacaaagatgtatgtgtgctgagacgtggctgatggttgctgtgaccaaggaaaccagcataagtagacatgaatcaagtcggagcctacctttcatctcagaggtggtgcagctgtttggtggagccatttggactcttcactacgatttcttgattttttttttacatgatttactataaaaattggtgatttatacagaaagaaatgtaggtggtgcatacattaaaattttaggttatttgggcaacttgatattgcccaaagctgtcttattgtcccaaggttaaaattagcaatgtgtttggtacatttactactgaattcagtggcattttagaaaaacagacgtgtgtagtgtaagaatagataaaaattacaggaagttttgagcccagcagtaattttagattgctaaatatatccttacattattaaatttgattgggcttgatttgtgtctgcctccctcccttgaagtcagattacttagtgactagggaccgggaagaccatgcttcagtgggtgttttattataagacacaagtgaattgagtgacgtgtgtgcattgatgcaaaccttacatctgcaagacagacgcacggcgttttattaggcatgtcacctcccttctggtaattggtatcgtattatttcacaataggtgctttctcgatgacgttggaaatttaaagattcccatcgtgggagcctgacttttgtgttgttttaactctttcagttttgctgtgtctaaatggaaggaaataccttgtgaaccatcttccatagacaaagtatattttcagactgtgacatttaaaggttaaacattgtttccccaagtgtggccctcgttggtaccaaacggttggtaccttcccggttcaagtgattctcctgcctcatcctcccagtagttgggattacaggcacccgccagcatgcctggctaatttttttgaatttttagcagagaaaggctccatccccttcttggtaccaaacctgccactggcatcaactttgcggattagagtcagccacggggttttacgcctcattgaagagggagggcaggaggaacttcagaagtaatttattgcaggataagcatggtctccagctagaattttcaacaggactgttttcattgatttagtgacaaaatttttccaaggtcatttaagtgagaaaacacaaatggaggacgcgtgggccagtttttatgttaagtcaaatgtccaggaaactccactgagtgtgtggatgctgcctgccttcactccccttcccagcggccgtctcccgtcacccccgctccccaggcgcccgccgtgcccagatgtttcagtaccgcctcaccgtccctcagtgaatggccctcagccctggggctgcagccaaatactttttgaaaacatactgccgtggccaaataacatgaaattccccatttctaagtgtcccgttcagtggcattaagtacagtcacactgttgtgcaaccatcatcaccatccctctttagaacttttacgtctttccaaactgaatggaactccagccccatcaaacaccaactccctgcagcccctggcagccaccggtccactttctgggtctaagaatttaatggctctgggaacctcatggaagtggactcataccacatttgtccttttgtgtctggctttttttcttttttttgagacggagactcgctcagtctcccatgctggagggcagtggcacagtctcggctcacagcaacctctgccttcccggttcaagtgattctcctgcctcatcctcccagcagctgggattacaggcacctgccaccatgcccggctaatttttttgaatttttagtagagacggggtttcaccatgttagccaggctggtctcgaacacctgacctcaaataattcacccgcctcggcctcccaaagtgctgggattacaggcatgagccactgtgcccggccgtgtttggcttcttttatatggcataatgtctgcaaggttctaccaggtggtggcatgtgtcagaatcttcttcctttttaaggttgtcatgttgctgtgtgtctcgtgcacattttgcctccgcacctgtccctggatagaggctcggcctgttcccacctcatggtggttgtggttcatgctgctgggaactggggtgtacagatgcctcttgaagaccctgctgccagtgctccagaagtggaattgctgtttctcgtggtaattatgcttgaattttttgaagaatcatcctgtttttcccagcaccccaccatgctaccgaaacctcacttgaaattccatattgactttccctcagcagccctttccgcagctcctccagctccaggcatatcctctgccgcacatcacctaccttgagtgaatgatgcggctccgactgctgcattgaaaaggcctggggtcagaggcggaggttgcagtgagccgagatcgcgccattgcactccagcctgggcaacaagagcaaaactccatctcgaaaaaaaaatgataaaagaaaagacctggggtctctcggtatcacctcttcctgtctgttttcctctgaagaggagaagcccacctgctgtgcagtgctgaccgtccccctccctgagacccgctccacccctagctgtttcctcaccatctcagatcttctgtcttcaccttgagctgccccttcacccggcccagatgttctggaaattcaacccgtgccttctggattcttctttgccctcggcgtttctctctcctacctgacaagagggtccttggccccattgcctctgccctcgagtcgtgttctgtgttctgccccaagagattgtggctgctgttcctcccaggtgcccccgccgcccccagctgcggtgtctccagtcagcctcggaattcccttctgctgtcttctcttctctgtgctactgtgactgtggtttcatgaaccactgggcttgctaggtccccagttcttcgtcttgaaattagggcagaaaagtcttggaaccgtttcctgcatgctgatgctggacctgccccttttttccttggcatctcttttggtgttttcctgaaactcccatctggtgatgacttgctgtttctcagaaaactgtgctgttcttcagctgccaggagaaatgggtcagattccagtgtgtgacatccagacagcttcataggcagcccacctggctctccaagcctttttccctcgtggagacccaagtagaaccagtgcgttccccaggaaacaccaaacatctgggtgtgaggagcctcctgagggttagctcccccaatcagtggttgatagaaatagcatgagcgcctagtgccagagtaactggagctgatacttattgatcgcctgctgttcaacgtgctttgtatttctcaactgatttagtctttacaatagccctattaagtagatactttgattgctttctgatgaagacactgaggcctagagaccttaattaacctacccaaggccacaagagctgggatggggtaacgcgctggtttaaaccctggttggctagttccagaaccactctctttcccatttggctcctagagacagtgttgctaagtcctggctatcccgtggtgtttggaaacagggcccatgcctgccatccacatcaatggagaacaggctggatgctttgggctggaaagatgccgacattatccctggtggagctttccatcgaagtggacatgcataaagcaacttaaaaactctggtgaaatgccacaagaattgggtgagtgtgaaggggagggaggagagttagaaggggctggtcacgaaggcttgtgggaggagaccttggcgatggccccactgtgttggcagcaggtggctgtatcttggccactcgtggattgcagtgctggattgaggcgtttggggctttgcagtcagttcttacaggcattgacatcatttcaagtccacaaatattactaccttcccttaggatgaccctgggaaaagactactgcatgcaggaccttggcatagtctgttccatctggggctgagaatgccagaattttctatagaaggaaactttgaccatgatccacagtaggaaattgatgcttacttggtatatgtgtgtgagtgtgtctgtgtgcattgtatgtgtgtgtgtgtatgtgtgcgtgtgtgttgtgcatatgaagctggaaaatgctcatgaagaagttctacactgattccctgtgatgcattctggcattttctagtctagtctcctttagtctattctagactaatgtatttcagttaaaaaaaaattgctggttgacaggcactaaatttatttcatgagcactaatggatctcaacctgcactggaaaaacactcctctttattcatctcaggactctgcccctctgtctcctgcttagtttattatgaaaatattgtcagctttctgcatttcttccattgtcgtgtagagccccaggcccctgacgctcaggcaactttcctgaccagcatgcggattgaactggggtgaagattaattgaatttgaggccccccaagctgaggttggcacacagatgcagaaggtttgtcttccttctggggcactgtccccagggagcaggcttccccatctctttccattctaaccatcacatggcgccatttccatctggctttcttagagaggagctgtgttgaaataagctattctgtaatctcagtaaatacagctgatgggtgagttctgccctccaagaggcacattttttgattcccttaaaaataatttcctgatttgaaatgaactgtattttcttgccttaaatcttacccagaattcttccttatgaggagtttttgctgctttttgtgtatttatttccgggctagcatctgggatccacacggctactcacagatttgtacacatagaactttactgtcctcagaacaaatgatctgaatgtgttagggatgatgataatttaagatcagatggaataggatttgctggcaggtgaggaagtcacgtttcactgagtaactttgggcctgtctggcacctctcctacagcagctcctgccttcgccccttcgtctttatatgtgttccagattttcataaaggtatcaagtcctggtttgcattaaacaaagcagccatttattgtgtccttgccctcagtttaaaagtaatatgtgatctggttagaaaaatgccaaaaagttaattaagaaaaataagaatcatttatcaccctaccttccagagattacactgttagcatttttgtttttacagtgatgagctctttttgcttatttagcattatcctatatatatacacacacatatgtatacacccacacctatatatacacacatataaatgtaacatatgtatagtataaattctcatgtgtatacacacacacacacacttttacagtgttgcatttttctgtatatatctacctgtgtccttcagtatttttcaagcacacattttgaaaggttacacattgcctcatggctgtatgataacttacttaaccagttttccatttgagggcacatagctggtttctagttttcagttttcatgaacagtgcttggctgacctctctgtctatggcaaaggccttgctccatctggtttgctctgaggcatccagattttcaaatgctctaaagtccgatgaaagtcatgatcaaggcgattagggcttgattcctgggtgatgactctgtgcttctttcattggcgccgtgtgtctgccctgccttggtttccactagagctcccgtctgtttcttttccacttccttctatgcttcttgtcattgggctatgcagctgccatggtggatgagtcgggagccacttccctctctcagaagccacctgcttctgtgacctttgtgtttcttggtacaggattgttggccaagttaggtaaggagacgagaactccggtgcgttccactccctctgacctgacgaatcagggcctggagcaaaccaaccaatgagatgttggcaccgtcatagaccagcaagcagcttaaagaaatttgggagtattttgagtcagaagggtttcccaagagcaagtaataaaatattttcaccttcttgattttgagtggaggagggggtgcactgatggtgttaattgatctgaggatgtcatgggcatgagtcaggaatctatttgagagtctctcatcattcgtggggacacagatgcggtggtttgaatgaggaccgtctaggtcacattgtctgtatggagacagacttgttgaattagaatattgggcagctgaggctggcaactcaggtgaagccaaccatgacaggaaggactacacttgttgagaatcagcaacaggccaggccttctggagagttctcctgcaacaaagagaagagagggaggtcccagagtcgaggaggtgagtaggccaagtttggaagttgctctaacaaaatactacaaacttggtagcttaaaacagtggtttttttcttctctcagagccttggagattagaaacttgaaatcagggtggcggcagggcaggttccttttggctgctccaagagatgatgtgttctgtgcctttctctaggtttctggtgatccttggtatttcctgacttgcagatgccttgctccagtctctgcccccgtcttcacgcagcactctccctgtgtgtctgtctttgtgtctcttctcttcttatgaggttgttaaattcagggccaactctactgtggcgtggcctcaggtcaacttgattatatctgaaaaaagactgtttccaaaacattcacaggtcccaagggttggaacttgaatttagccctttttttttttttttttttttgagatggagtctcgccctgtcacccaggctggagagcagtggtgtgatctcggctcactgcaacctccacctcccgggttcaaacgattctcctgcctcagcctcccgagtagctgggattataggcacccactaccacgccaagctaatttttgtatttttagtagagacagggtttcaccacatttgccaggccggtctcgaactcctgaccttgtgatctgcccgcctcggcctcccaaagtgctgggattataggtgtgacccactgcacctggcctgaacgtaaccttttgaaggacacagtttcacccacggtagacgtcatcgtggacgtcagtgtagagttcactggcaggtcagtggtgaacaaaggactggagaggaagtgggtccttagccaggcacccacagtcagtttgacatgggagctgcaggactggaaacttcttagaatctagtgtgcacatgagtcacctggaggtcttgttaaaatgtgattccgactctgtagggagggggcctcaagatgtttcattataatcaactcccagctgatgctaaggttgtgggtccctggccatatattgagtcagaagtggccacgcctcgccttgcacagacagctgctgtgtgagcagtagtgtttgtgggtagggcacctggtctcagttcttgcagccttcaaggctggcttcattcaggctgcctgccctcagctgtctgacgttctggactattttgatttgataagtttgccctacacacagatgatgacacacttgcaagtgtgtcatgttaagaaagactcagcagaagaaggaacgagggaagtgaagaaaatattttatggcttgctcttagaggacctgtgggtccaaatgctccccatttcactatactgcttgctggtctgtggccctgcagagggttgggtagtctggctgagatctgaactcaccaggtgctgcagcattccagtcttcttggttgcttcctaggattcttcctgcccgctctggagggaacaataccactcacataggcaagaattaatcaggagaggtctggataaatacacttgtttccttgagcacctctccacccacatttatactgtgcacagtactttgcaacagtagcagaaatgcagcagtagcactaccttgcagaaatgcaacagtagctgaaatgaaaatcatctctcttccaccgtttcttcagcaaaccaagtatttctattggttttcttccaattctagtgcatgcccatcaaaatgtttatgcttgcaacctgcgtagtttttggtttactgatttttttatcattttatcacaacacctttccattattaatgtgtagttgtaattgtaatggctgtatgccagttcagaacatgtgcctgaattgatgtgcaatcatttgcttaatcaaatgatttttcctcaaattaatttttctattgttgaatactaccgtgttgcttttagcattttaagcctgcaacaaattatttcattgataagtagtgtgtgtttatgttttctttaattttatgatccatttttccatgttgattccttcacattgccacttgttagaggacaatgctttaatttgagattgcagaattctaggcacttgcttgccatccctcctgccttgtccccagtaatgatgctcactggtggaaaatctctcctttggccatggtggcttcagtgctcaggaacctgaacttattttcttctcccacccctgatcttgttcagagatctctcttgttaggtgctcctcccacatctgtgccctcggtcttggattctgcctgctgccaacatgcaaggtgccagtgagcccctttctccttcctccatcatggtcaggatttattcagcatttctctgaaagtgagcaggtctcagagttatgcttagtacctcattgttgagttatgtattcacctgtttaaaaaattccttcaatcatatgttcattctcctgtgtgccaggcactgtgctaggcactgaggagttacagcaccaatcacacagatacgctctgtattctcatggtggttccattggagtgagcaaggcaggcgtgaactcagtaaccatcccctatgtgtatagttgcatagttgcaatatgtgattttaagcaaatcacagacataaaattatcattgtggattgtagtcactcattttaagaaaaagtaaaggtcagggtgacaaggtatatcggggcattggaagtagtttaggggttcaaagaaggtgctgatacaaaggtagtcaccatgaggtgcttggatatgtaatacagcagaggaaaatgccaaacccagactctcgtatggtttggagagaactgtgctgccacttttgtccagaggggttgtggagcatgaagtaatcctaatcccttctgttcgtgcagtactctcaggcaccaaagactttgatgcgtgttatctcttaggatcctcccagcactgccatggtggttgttaaaaataatgagaaagctttctaaagggacgggcagagaacatcatcatgcaaagtctgtgcgtcttaatagctgactcattgatggaaacatttatatcccacatccactggctcttgtctggcttcttcaaatgcacctgtccctaggaccccttcctagagataccagcatttagaacagaccagtctaaacaaggtcttctcaagtgaactgaagatactaggcctgcaaacgctcatctgcacttcacttacgatgtggcatttataaatgcattcaccgtaggtgtttgtagattctttttatgttttaagttttaagtttgcagcattgaggcctattttgattgcaaattgcataaacctcaaataagatctaaatcaaaggaaaggtattgcatgcttataggtgactcaacattaagaattcagttcttcccaacttgatctacagattcactgcagtcccaatcaaaatcccagcaagtttttttgtggctattgaccaactgattccgaagttcatgtggaaaggcaaaagacccagaataatcaacacaatatttatggagaacaaagtcagaggactggcactactcgacttcaagtctgctggaaagctccagtagtctaattacagaaacccaactccaattcacattagaaagaaggaaattaattgattcatgtagtttgggagtccaagtgttaagcatgagtgagtttaggatttagaaggtatcctcctcttggcttagtatttatttctctccatttgagggaaaagtggctgccagtagccagaggcttgcaattttcttttttgtctaatagtcttcgaggacacagagtgaccgtctccctctttaaggcaatgttaatcttcagacagaaccatcgttaaccttcttttaagcaggaggctatccctgaaaggaaaagactgtgaagttgaaacagaagtagagcttcataatgcagaaaatggagaaagagggatgagaggactcacaggaaggctgaagggacatttgtaaatgcagctgaagccagtgcaaattggcgactttgtgaaatgggttttgcagctattctttggagctgtctgctgaggtgatggaaagggtagttaaaagcttcatttaggattggtgttctgccagcatgccaagtagcccaaaccaaggcctgggaggagagcagactttaaatatgtcccaggaaacgttttattgagaaacatgtcaactaccactatagcattatcaagagggaaaaaggaatatttcatatgtgagcttaaaaaatcattagctctgttatattgaatacttgcaaaatttcattaaaattgtttttgcagaattttatgatagaataaattacttttgtgtatgtattgatgaaatcatggagttatatgagtttggatttctcaagcacccaaatagtcaacatcaagaatcagggaattaggaggttagaaagtcacatctttagtttttttcaggaacttgcccaggaacagaggggtcctaggtgggatgaccagaccccagttctctgttcttcagcccagtgcttttttcatgacatcactcaagtcagattttaaatttgtgcattacactggctttatttagaatcctgtgccaggcaatatagttttgattagaagctgaacagtattattctccatgaactgtgaatgtgacacttttataattcaagtagaattatttttcccttgggaaatcctatacattcaatatggtacattgaattagcaaagaggtagaagaaaaaaggggctataaaaagtgtatcttattaaaacaaagtaggttttcttcttgcctgtgtcacctttagatagtaattcttagcatcactattttttaaatcacaaattgtcttctatctagtgaaatgattaagaaagaacagtagtcctcatttgattaggtgaaacgtgacacaagtctcgttgatttttgaaaaggacattttcatataattccaagaaatacacattctgacattaaacattttatatgatccctattgaagattaaaaggagaggtgtttggccgggtgcggtggctcacacctgtagtcccagcactctgggatgctgaggcaggtggatcacctgaggttgggagttcgagactagcctgaccaactgaccaacatgaagaaatcctgtctctactaaaaatacggaattagctgggcttggtggtgcatgcctgtagtcccagctacttgggaggctgaggcaggagaatcgcctgaacacaggaggtggaggttgtggtgagctgagattgcaccattgcactccagcctgggcaacaagagcgaaactctgtctcaaaaaaaaaaaaaaaaaaaaaaaaaaaaaaggagagttgttatgtctgggaaattaggtggccatcaagttttttcatggtttttctttcattgattgattgattgatttgattgacgtactgagaccgagtctcactgtcacttaggctgtagtgcagtggtgcaatcttggctcactgtagccttgacctcctgggctcaagtgacccttccgcctcagcttccaaagtagctgggactataggccagcaccaccacagatggctaatttttgtaatttttgtagagatatggtttcgtcatatattagtctattttcacactgctataaagaactacctgagactgggtaatttataaagaaaagaggtttacttgactcacagttccacaggtttaacggaagcatgattaggagacctcaggaaacttacagtcatggaggaagacgaaggggaagcaaggaccttcttcacatggcggcaggagagagagcggagggggaagtgacacacactttaaaccatcagatctcatgagaactcactgtcatgagaacggcaagggggaggtctgcccccgtgatttagtcacttcccaccatgccgctcacccgacacgtggggattacaatttgagatgagatttgggtggggacacagaaccaaaccatatcactccatgttgcccaggctgagtgctagattcctgtgtgttattttagggcactttatacttttattatttaccagtgtttgagaagtttatgatggttcacaaaactttctcttcctacgtgggtcttatgtgtgtttttgagtgagctgatgatacactcgtggccagcactgttctgtgctgtgtttctccacccagtgtgtggacatcttgctatgtgcacaggtaatatgtccttcttacacagaggggtgcaaaggttgagtcaaatcagcatccaaggagttgctgataaattgagaacttcctgacagcaagtgacaccaaaacctcaactaaaatgatcagcaaagatccattaagaaaatatcggccaggcacggtggctcgtgcctgtaatcccggcactttgggaggccgaggtgggcggatcacaaggtcagtagatcaagaccatcctggctaacacggtgaaaccccgtctctactaaaaatacaaaaaattagctaggcgtggtggctggcgcctgtagtccctgctaatcaggagactgaggcaggagaatcgcttgaacccgggaggtagaggttgcagtgagccaagatcacgccactgcactccagcctggatgacagagcaagattctgtctcaaaaaagaaaagaaaataccaagaaccagaaaacgggtcgtggcgtaaaccttggtgaggaccttggaattcaaggtgaaaggcagagtgtgccccagggagtggtgagggttcctgcagcatatgcagctgcatcccccaccccagcaccctgatttctcctcactgctcagctcctctggaatccttgccttcccacctcattggtggagctgctccattgaaacccaagactccattccaggcctggcctcagccccatctctgcccagggctgacaggggggctccgtcatctaccccagggcctgtgccttccttcttcctcctggtggcatttccatgttgggggcccctgcttgtccctggggtgcaggaattcttaagcacctctggcattttgctcctgccttcttgcctggagtttcactgctgtctgcaggcctttgagaacagaggcagggaggtgccagaagcccttgagagtgtggtgattaggggttggatgccctgtgcgaatggcaaggaggatgattcttgaaagaaaatgtcagggtaacttaaatttctctgaggtcagcttgcttgttgttaattaagttcttactacgagggccgagcgcggtggcttatgcctgtaatcgcagcactttgggaggctgaggtgggtggatcacttgaggtcaggagtttgagaccaacctggccaacatggtgaagctccatatctactaaatatacaaaaattagctgggcgtggtggtgggctcctgtaatcctggctactcaggagaccgaggtgggagaatcacttgaacccaggaggcagaggttgcagtcagccgagattgcaccactgcactccagcctaggtgacagagcgagactgtgtctcaaaataaaaataaaaaaagttcttaccaagaaagcagtgctaagtacttctccagcactgcttcatgtcggttggcttctccagacatgggcctctttgtggatgttattggaaagggtagtgttttaatatacgtgcgcttttcacatggattcaaggatggcatgggtgggtgggattactcgactttatagcatattaagtgcttatttggtgccagttatggactcgtactgggcagatgccatgaggaatgtacagtggaagatgttggattctgactgcaggagaggaaaccaggtattcgaccccccaaatagatgacagattgtgtggtacatcactgcatcattgggtgtccagacgagagattgcaggcaagacaaggacctaaagaaagtggcaagtgcactgaaaccaccagttaaggcctcctcagagcaggttggactgccctgagctttgaggggtgggtgtgagttgagatgggggagcattccatggaggggcaggagggtatggatgggagggagaaggacagtggaaggaggtggtggggatgggttgttctcttgggagcccaggggcaggagtggaggcaggcagcctcgttccacccctggtattcagagccgagaaaaggaatttggacgaggaggtgctgtgctaatgagaggcagtattagagatcctgagctgacacactggaaattgacatatgggcttatttatttatttattttatttatgttttaaataaaggttaagatcttccagagaagacataggaggagaaatgggcattatttttccaggggtctcttagtatgtaaataacctgagttcttaaaagttttatcttatagaatttttttattagttcttttatttttgtcatgggaaaaattcagaagctttcctggaaacttgcatgtctgctttcagagttttgtggctcttacaaggagcccctttgggggtgtggggcaaccttgcatcccaggaagccgcctgggagattctagggctggtacctcctttccactcagctgcctgggagattctggggttggtacctcctctgcattcaggctgcctccatcagctgaagaggcgagagtgtcataacatgacattctgtgtatgcgcaatgtatttgtagaagatactgatctttggatccggcaatcccattcctgggtatctacccagaggaaaagaagtcattatatgaaaaagatacttgtacatgcatgtttacagcagcacaattcacaattacaaaaattgtggaaccagcccaaatgcccatcagtcaacaagtagataaagaacatgatggagtactacttagccataaaaaggaatgaattaagggcatttacagcaacctggatggagttggagaccattattctaagcgaagtaactcaggaatggaaaaccaaacatggaatctcctcttcatcctttttctgtctgcctttccttgttctcatacttaaagacagcgtgttgggagcggtatattgctgttgtttttgtcttctccaatctgaccacctatgtcttttatttggagtatttaatcccttgctttttgtttgtttaataatccctttataaaacagctgaattataaattgatggataaatttatagatgttgaaaggcacaaatctgaagtatgcagcttaatcaggtttgacaaatgctgacactcatgtaacccacactggcatgtttgcaccagattaaagaacatctccatcaccagtctctgaacattggatgcatttaccggtggtgttgggtatatttcttccatactcccgtctggaatctgaacctcttgatcccatttgcctcagcaactctgactccttcagactgaaactttctatcccacagtattttcttgtttccatcaagaaaggaagagatttaaactctgttctgcaattctgtctgcatttcctctctggaatccttctctctctccaaacaaagtggttacctctttaaaataggcagtgaacatcaaggaaaaccttgcataggctgaaaagggcaaagtgctcacctttgcttgcattgggaagtaatttcttttaagtgtgcatagagacagactaataaaaaaatctgttgagtgtgtcatgtggcagtcagtctttagaagtgttgttcctttgtcttttaatcattctcagaattagcacaccagttgtgtgatatgtaaaagtctattcctggcagggtgaggtggctcatgcttataatcccagcactttgggaggccgaggagggcggatcacctgaggtcaggagttcgagatcagcctgaccaatgtggtgaaaccctttctcttctaaaaatacaaaaattagctgggcgtgtaggtgcatgcctgtaatcccagctactcgggaggctgaggcaggagaattgcttgaagctgggaagcggaggttgcagtgagccaacattgcgccactgcactccagcctgggcgacaagaatgaaactctgtcccaataaaaaataaataaataaatcttttccctagctcatttttttttgactgtgttaaattcagtggagcaaggtctcatttatatcctccttattcataatttggggtaattagcatagtggttgggctgccattcacctcttacagctaggaaaatgaggctttgcgagaggaatgcaaaaatataaacaggattaagtcattgatggcatgctcatacttcctaggagaattaagtcttttcaggtaccacagtatgtatgagtccttcttaactctcatttccaccagatctccaccaaggagtttagaactgatggactccaagtctccctctggatgagacattctgagttcttgccaatatcatgctaagctgggttgataatttcctttgaaaaatttcctttgaaaatgagtagcatttcatcttttggaaatttatcattcttcagacttttcactgacctgtcccctcccatagccgaccccctcctgtaccccagggtttgattgatatttgcttttgtattgtaattactatttaatatccagccctcctgaggtttgcttcactgcagtcacattgtattgcaagcagaaaatgtcacgtcgcctggagctgttggggtagtgtggttgtggtcctttgggtatttcctggcacacctggctcatgacatcgtgcagagctgaacaggctctaggaggaggaaggaaaccttgcctgggtacttaaaattatctatcacagtggatcctgagtctgcctctcagcctgtcttgaatgccaggctattataaatcagctttatttattttgtgtttgaattttgactttcctgttcaataatttaatattttaaaatgacacctttggtcttttatttgtcataagcgagggccgagttagccaccctgcaatttgcctctgtactctccgccccccagtgtgtagtcgttagctcataattgttttcttaacctcctcagagcctggtgtgatcttgctctcaaccttcttgaccttccaaggtagttaaatgaggttttgctttctctatgaattaattatgtcatctctatttgaaatgttcctgaacccatggtgctgtattttggcaaaataaatactattttcagagactgtaagacccatccattttatttccttttattagaagatagaacgattttcttagatgagcagttatcagctgatgttcaccttcttggaggaagggactgctggcggttttacttcaaatgcagccatttgaagtatctgatttggaacattccatacctggtgcagaggccacttgtttctacaggtttgtcctggtggtctgtcctctgtgccattgaactcccagagtcctctgcagaggacatgtaataattcttgcctattaatttgtggaccctgtatgtggggctttttttttttttgcctgtttgagacttcctgcctttaggagtagacaatgacctttcatacgtttaatgcttctgttgttctcaagtttgagaatgtggtgtgtcccctgggtcccctccttacatgaaatccaacccaaagggtcagtgtgtttcttgtgtgtttctgtcttcactcctctgtccgctttcatctctttcctggtgagtctctgccctgtcataagcaaataaccttagttgtttcctccccagtaatggtggcttcaattgctgtggatttcctggcctgatttcaaggctaggggaaaatgcctgtgtcctggttcagaacaggcagtctctttatttcttctgtcttgccgtggacaaatagaatcgtggcccttacgagttctttctaaaaaaatcacctttattgaggtaaaatttatatgaacaaaaaaatagaaccatttgaagtatctgattttggatcattttgaaaatgtcccaaatgtcctctcgtcaccaccgtaatcaagagctggaacatttcgccaccccagtgatctccctttgctggcccctggcgatgctcatacatgtggtggttcttcacgcgaaagcagctgacctcaaagagggtgaacatgagccctgctttcctttcctctttgacttcctctctgatccatccctaaactacaggattttgtcatgttagttcctattttctattaccatgaatgactgttggcgcctcaggctggggaaggttaattgtagtaacaaagaagaggttttcctggcaggaaccatttccttactcaggaaacaaacgctttcctttctcacagtcatcttctccttcttatgtaagtagaaatattaagccatactcagtctgtccaggtcctgagaattggtgtctgcccgggtctgggtttgtattagtctattctcacgctgccaataaagacacaccttagactgggtcatgtataaagaaaaagaggcttaatttaagggactcacagttccacatggctggggaggcctcacaatcatggcggaaggtgaaggagtagccaaggcatgtcttacatggcggcaggcaagagagcgtgtgcaggagaactgccctttataaaaccgtcagatcacatgagacttattcactatcatactgtcatgagaacagcatgggaaaaacccatccccatgattcagttacctcccaccgagtccctcccacaatacatggggatgatgggagctacaattaaagatgcaatttgggtggggagacagcccaaaccatatcagggttgcagaggcttatgtgggaggatcaagagtgacagcaactgtctggctggaggggaaggagacagaacctgtccctgggccttcgtctcctttccccgtgccccacacctagccctggggagcccgattccctcctcacactcccttggctcccttcttgtctctgtacacagccccaagcacaaaacgactgctcattttcctggccatgctgtgctttgctgtctccatgtctttgtgagcagggatctttctccttggaaggcctgttctcttcctgtcttccaggacatctgcctgtcagcagtcagccttctatatccactgcagaggccatttgtttctgcagatttgtcctggtggcctgtcctctgtgccattggactcccagagtcctctgcaaaggacaccatgttttcattaaacacatagaggaggcatgttggcaaatgtcatttgcagatctgtcttctctagcagggcaatgctcttggccattgaacattttgcctggcatgccacaggttccaacactttctggacaaatgaataagtgaactggagatcagtaagttattttgaaaatgcacctgctgtggcatttgaggagatgtaaaatacctggtgccctcccttcccaggacccctccaagctggacgagcagtcctggctccttggtggggcattgtctggtgagccttgagggcgtgcttgggtgccagcgatctccccaccctttgctttgttagtttttgctcctgacctactgctttgatttgagaaacccttcggctattaaaatatgagttaatcatctaagaaactcactaactgaacttcatagtgaggaagtatgcttcctgttgatagataataaaacagagtggaataatttgaattctttataatggatgtgattataaatgatttccccatttactcatataaaaggctaaatggaagatgattagtgagttctgttttctgtttttcctaaggtgattttttaatcttcccaacaaattcctgcgatacagggaagaaaaagaaaaacccattaaaatttgcttaaaatctttaagaagccatttaaagcttcagaactgagtaatctttctgcccccttagtatattatggcacaggagagaaaacaaattacaggcaaccactctaccttgctttaacgtagggttaggattgcttgacatcttctgatcacattattgtgctgctgatacttgtcataaatgtagtgatgagattctggatgtaaaaatatttataatttcccatctcttgttatccctaaaaaattaatatttgtaatgggtctaaatccttctaaatcccattatttaatattgttctgcaatttgatgattaaagaattgttatttttttacctcctttatccttaaatccttcacccataatctcctgtttataattgcaggtgtctaatgattcataattagttaattcttggttggtgagtgattgtttcatattgcaattaggaagatcatgcataaagccatttctagttaaatgtgtgtatgttctttaccaggcttgtgttcaagagttctgtagttaccacgttatagtaatctctgaccttatttttgttaagcaaagacatctggttcaaagaccctctctcaccagcaagcggttctcattcaatctaagcatgttgaaaaaggccctttccctaaatgggcttgggagcaatactggggtcgtggctgtcctcagggtgtctgagcgcttctttggtagtctgcaggggaaaataccaacactggtaatgccccattcagatgcagtattctgtccaacaaggcacaattgcctgcctgggaataggaggctgagataccattgattgtttcctatgtcacttgtcaagtggaacacaacacaagtgaatgtctgcacaaaatgtactttgctatacctttctaacgggtttacatgagggaatggagctcaaacttcacaggatattctatgcagagtaggtcttaccctagggatgctcctgctgctctcactccacctgtcctccacccaccaaggcacagagactccagcaaatgtgaggaagagggtggggattggttgatgggcagagctggctctgtgaaagggggttaatctgaggcatcttacctcctgaagacttgggtgatgggagggagatgtttctggagcccagggcagctactgtggcattgagaccaccttagcctgggttggcatggaagactggaaatcttgcctttattcctgtcttgttcgttgtcctctgattgaatctctgcgttttagcccattgtcttcccaaagcttgattctcacctcttcctctcaactcctggcctctgtaataatggagaagccttgggcctggaatttggaggggaagaaagggaggttaagaatccttatctttttgctttcttcattatgtggcttcctcgatctttttgtacaacagtaagcaggcttttatgaactagtagatattaaaaaccacatcagtgccaactaaacaaattatatccaccagatacttttgagccctctggtatgtgccaggcaatattctaggcatggagctctatcagtgggcagggggtacaggtggcagtaatatacagctgaccttatgttctcatcatggcaaagagacagtagagaattgcattatccatcagttagggataaaacaacaaatacccactgctgtttattatctctgtcctcttatttaagaaaggaactcttggccgggcgcggtggctcatgcctgtaatcccagcactttgggaggccgaggcaggcggatcacgaggtcaggagattgagaccatcctggctaacatagtgaaaccccatctctgctgaaaatacagaaattaccagggcatggtggtgggtgcctgtagtctcagctactggggcggctgaggcaggagaattgcttgaacccaggaggcggaggttgcagtgagccgagattgcgccactgcactccagcctggcaacagagtgagaccccatctaaaaaaaaagaaaaagaaaggaactctttgccttcttagagcaggagggaactgagttcttcatagagaacagatctaaattatagaagccattattattatttttcaccatttttcttattgtatcacagtccagttgtgggacattgtggatcactgcaggctgcacacaggcatttgggaggcatgacttctttctgggtactgtgcctttttaaagcctttggtgattttattcatacttgctttcattcaacaaatgttttccagcaccaactgaaggccagatgctatgggaggtgctggaaaggtattagagcctcatctcttcaggagttcgtgactcggtgcggggatgcaagagggattcagtgagggagacacaccccccgccccttacagtcctgttctgtgctgctgttggatgaaactgctctgcaggtcttaggaaccagccctggaaaccccacctcccatccccccacccccggtgcaggaagggaacttagtcttcattatgtgaccacccacttatgtagacttcccacatttccccccaaattagtccccaggagctgagtaaccttctctttgagtccttataacatttttatctgaaatgcaaaaacacatttgcttgaaacctccatgctagtttggcatgattttagaagttacctggcagaatgaatacaaaagaagcaaagaaatttaacatgaacttggcattttcttgctggcatgaacataattattggatgtcattataaataaaccttttaaaagtcactttaaaaatagaataattggctacattgcagagatcatgaaagatcatgaatatgtatataacagttaattaaaaaaaactgctaatattatttaaatgggtgattgtggcttgggaaaaatttttctgtggttcttaaaaagtcccgtgtcttaagcacttcagattgacgtaaaatgatgacgaaaatgggtcttggtgatgatggagacactcacgtcaaagggacatgtaaaaagttagtgtaaaatagttttatgaaatggagagtggacgaaactactttaatattcctatacatgaatattagataggcatgcataattaaattaataacgtgttttagtaggcacttggcttttatctgtatctataaaagtgtaaatacttgaggtggccaaaacttgacattttctcattgtaatgcaattcttatttaatccagagtcacctcactcatagggacagaaagcatttctatagagcgggattggtagaagaggggttcatggactacataagcctccagaaggccaggggatgtggtcaggctggtggaaggaaaagcactctgcagcttgttcttagagcaccaggtttattaaatatctaagtgggcatttttctaaacgagtgactttcttcatgatatgtgtgtgctgaattcaaactatacttggcaaagtaatgtgagttttcaggagatgggcttataatttttcatgcagcagagggagcatcagcttctcaagtggatgctgagaagttctgtgatgtttagagaatccagttagatggctcactgttttatgacattgaacctagttttgactgagtcacagaaattcatgccgggctcagacgctgatgctaacaggggcaggggagtggagtagaggggtgctgctttgtggacctatcttggggagaatattgggtagagtgttggtccccggagcctttagggtagattgtggtcctgcgggcacttccagaaaacagtcagcggctaacctggggtgggcgagggagactccttaaagttagaccacagtccccattctcaagaaacatcccccactcttgctgaagtgtccctgtgcagtttagggtagtagccaagccttgatgaggttactctgatgaaatgtaagtagcattgtagaactaggaattggcatcatttaggaccatttacccgaagtagaaccaaaataatttggtattaattggtcattaaatagataaggaaactttggctacaaatacacatcttggaattacatggggactctcaccctggacttcctttgtcatagctttatttttatacacaattgtattgatcaaattctagaccttacaagctccacagctgaattatttaattctctctgatgatcgtctcaattcattttccaataaatgtaattattttcttgccagcgttcgtatttaattgctaagttttctctgatttgctctaaatcatcttttacaaatgcgtagtgaaaggcagcaggttttctcttctgatggtggcaattataaatgtaattttatttaacttgataaccagttcgctgccaccaagggcctcatatttttctttatcatatgtttgggcacactgtgaaatcatcaaacaccaaaccttttataaattggatgtgcatgcttttgtccttttcgcttattattgtactgtttaccgtcgtcttctgtgacattttctcttgccttcagtcaattttggaagcaggcacattcttctgcaacaaaacaccatttttttcttgattgtaagcagagatgtcattcccgtgcttgtgttagatatacccttagaaattattaaaagctgtccagctgcctagtggttatgtgcatggtagatacctcaactgtgtttgtttcgtttgtcctggatatatgtctctgaactcttgcttttattgaaattaatctcttgtttctgttactgtctctgaaaataacaatgattatggtgctttttaagtaactcacaatgtgtttaaactatgtgggaaagagaatgtgaaaggtatgttatatttattttaatgttgcccctcaaaatgaactggaagccgggttttgggaggattccatttaaatgcatttatgctgaccttttcatgattctcatgtttaattgtattgcacttcagagtcacccagcctgaaagggacttagaatcccatggttgccagttggtgtatgactgcgcctccctcagtggtcaaaactgagattaaaaagaaagggaaagccctgtatttggaaggttatatccagaggagttcagcacccctcagagtctaaggggcttcctggtgatacggccccaccgctgcagagaaatgcccccagcctccctacttagtgcaccaggggtctggaaccctctctccctaacacccaagaccatccatagctcggtcactccccacagacttcacccgcagccatgccgcagccaccagcacctaacctccagactcctgaggaagctaggcggctcccctgtgtcacctcggctctgccatccttttccctgcccatacacatggagccctggacacggtggcccgcactgcccttgatggagtgccttgtccctggacccctcccgtgactcagctctgctcctgttggccttcttgtcttctgtctctggtcagcctcttttggtctctcctgtggactttgcttcttgcccctgttctctgtgtgtttcttgatgctctttcccatggccactccctggaggcccccacatctggattcagaccccctacccctcgggcctcttgcgcctcctccacctagccccttccttctttttttccttggcttctcctgtgcacccactttgtttccttccattctgctgttcactccagcctcaatctccactctcagtgacttactgcttccttctcctggggacctcaggaaaacggaggattctgacccccacacctaagataataggaaagagcctccctcccccaggagagggggctgcccctgcccactgcccctggccaagtccaggcttcaggctggctctgcctttccaggccatggatgatgtttgaatgaggccctgggcagggcgtggagatggagtgagccctcgagtcctgggtggtggatgctcttgtctccaggagagatgctgcccagtgctggcgtgtggacaccgtgccatttagtcttccccaactagcttttcctttggaggagaaaagattgtctgacttgtggcaatacttttagttccataactgtaaacttttctttctcttttttggtggcatttataaaaattccctgtcctacatatctgaccacatttttaaaacatttattagtttggatgttcatgtttaaatcacatgatgtaaaatgtttgttgagacacagctgaaggattgttgaaaagcaactgtagagaagcagcaggagcttgtttaaggggtgggaggtgtgggcggcagttctggacagtgattgctgttcgggacactgggatgcttctcctttctggcttcctgggattttttttcctgggcaggttctattaaaccttgcttaatgaaggcactggcactgatagtggcttgcatttggcaagacatggctgttcctgggtaccaggcagtggcaccggaactcattaagaaggtgactaatttcagggccgtgttaacatagactgaggctccatcatggttcccaggtgtttgtcggtcgccgctggagaccattgtgtggatcagtcacatggtctgctgcagtgtgagtgacagacggtgacttgctatcagtatgcaaaggtcacccggtgactattccaagaagtgtcattttccagtggagaatgggactttttttttttcctgttaataatttatttcttaattgcggtaaaatacatataacataaagttaatccttttaaccatcttaacacgaacaattcagtggcatggggtacatttacagtacatcaccactaggtagttctagatcatttccgtcaccccagaaggaaaccccacagccgttacagtcactctgtttcccccttcacactgcctggcaaccacgaatttgttttctgtctctacgattagcttcttctgcgtatttcatataaatggcactatagaatatgtggctttttttggtatatggcttcttttacttagtatattctcagggttcatccatgtgttggcaccccattactgttcatggctcggtagtattccattgtatggacagaccacaggtgtttatccatttatctctggatgcacacctggcttacttcaccttttggctgtagcgtatagagctgctatgagcattcctgtacaggcttctgtttgaacgtctatttggttttttttttttttttgagacggagtctcattctgttgcccaggctggagtgcagtagtgtgatctcggctcactgcaagctctgcctcctgggttcacaccattctcctgcctcagcctcccgagtagctgggactacaggtgcccgccaccgcacctggctaattttttttgcatttttagtagagacggggtttcaccatgttagccaggatggtctcgatctcctgacctcgcgatccgcccgacttggcctcccaaagtgctgggattacaggcgtgagccactgcgcccagcctgaacgtctatttttaattcttttgggtatacatcgaggagtgaaactgctgggtctgtttctgttgagttgactgaagaaaggatattcgttttattgctctatctacatggacctctcctgcattacttcagtgagttgtgaaggttggtctggatcgctttccctctttcctttttgaattgtgcctttagctgtaggttgaacacaggtgctatctttcacgttttcagatctctgagatcttcactggggatcaaggtccaaggaatcaaagctcatgctgtgtttgctcctgagcaggagagagcgttgtttagagggagggagaaggggaatgcttgaggtcagaatcacaggacagcaaatccgtcttgagatttcagaaatcaccataaatctgtgtcccttcccagagaagagcgtgtcaaaatgcagcattcgtaattgaagaaagcaaaatcagctgactaagtcgtaagacctaggatggtgaagagtctcagagtgaccaaaaacacacagaccctgttctcagggaagctcctgtgcaccgactgcatgctctatagacccctgccctgtgggggcccattcatgcttacagggtacatcctctgggagaaagcatgacaagttggtaccggggaacctgagggccgggatgaatttcaggataaaaagagcagacttagggatgctgccatagtatatcgtctagatttgtactgccctattgaaattcaaataaaatacagctaaatgttccatttctcagtcaccctacctgtatttcaagtgcctgatggacacctgtgcccagtggtgactgtactggccagagctgctgtagaatagtcccatcactgcggaaagttctgctggtcaggtctggctggaccgtagacacaggagtggccatagcagtagtgctgggagctgagaaggtgcccagtgcacagaggaggatgagctggatcggggaggagaggtcaggatttgatcctggaaaggtgtcattgtagtcctggctctgtcatcgctcagcaaggcatcgctcccgccacagggccccagcctccctgtgtgcccaccacgggcctggcactggccgccctctgtgccactcagggcaggagagtgagggttgtgccacacatgggtccgattgcttctccatggcgagaagaggacagacactgggaggaaaagttgaggaaccttgacatcccatgctgctctgtcatccaagtggctttttggttttctaggcattcttttttttttgagactgaggatcgagcagttctcctacctcagcctcccaagtagctgggacttggtacccaccaccacgcctggataatttttttgtatttttaatagagacagggtttcaccatgttgccaggctagtcttgaactcctgacttcaagtgatccgcctgcctcagtctcccaaggtgctgggattacaggcgtgagccaccgcgcccggcagacattcatttttattacaatttacaaaggtattggtcagaaacagaatgaaaatggaaggaaatcctagtctttccccaggtcatgggagaatccttgctttaagtgtctcatggggtggggtgatgtattcgtccctcagggctgctgtcacaatacaaacgaggggcttcaaacaacatcagtgtgttctctcattgttctggaggccagaagtccaagagcaaggcatcaccagggccgtgccctctctgaaggctctagaaggctgtagggcagaatccttcctggtctcttccagcgtccagggctgctggcagtcctcgatgtgctgtggtttgtggctacatcatgctcgtgtctgcctctgccttcctgtggtgtgtgcagctttgcatctgaatctccctctcctttttctttctttctttctttcttttctttctttctttctttcttcttttttttttttttttttttggagacagggtctcgctctgtcatcccggctaaagtgcagtggcgtgatctcggctcactgcaacttccaccttccaggctcaagtaatcctcctacctcagcctcccgagtagctgggaccacaggcatccaggctggagtgcagtggcatgatctcagcttactgcaaacctccaccttccagggtcaagtaatcgtcctacctcagcctcccaagtagctgggatcacagacgcgtgccattgcgcccacctaatattttgtatttttggtagagactgggtttcgctatgttgccttggctggtcttgaactcctgagctcaagcgatcctcctgcctcagccttccaaagtgctgggattacaggtgtgagccatcgcacccatggcctttttttttttcttataaagatagtcatcattggatttagggcccactgtaattctaattggagtttatctgcaaagattctgtttctaagttcatttgtattcacaggcaccagaatgtcctagtccattttgtgctgctataacaaaatacctgagactcggtaaaatacctgagtaatttataatgaacagcagtttactggcttgcagttctggaggctggcaagtccaaggtcaaggtgctagcattaagggccttcttgcctggtcatcccatggcagaaggtgagagtgtgagagaggatgagagggtgccaaactctcccttttacaatgacccagtcctccctatgtggctgagtcctcatggcctaatcacattattcctaaagttcctacctctttgcctgcctgtagtcccagctacatgggaggctgaggtgggagtatcacttgtccccaggaggtagaggctgcagtgagttgtgatcattccgcagcactccagcctgggcgacggagtgagaacctgtctcaaaaacagaaaaacaaacaaaaaatcccacatcttaataactgttacaatgtcaatgtcgattaaatttcaacttgaattttggaggggacagatatttaaatgatattacacaggttaggtcttgaaatttttttggcagggtcacaattccatgcactgcatatgggagtggaaggggtatgcctgcgggtggggagccaggggcttgagctccactctgcattcactttttgctctaccccaaagccttcccttcccctgtcctgctccctctacctgtgagtgtctgtgtaccctggccatcctcgatggcagtgagtctgagtattggtagggtgggctagagcctgggacagcgaggcagctggagggtggttgagggtggacgggtgcacgctggacaggcagaatattctgcgccattttgcctcgttcctgcatctttcttcctctgctgtcctgcacacacttatcttctacccacttctgttcccgaagggctccattttgtcagattattcagaccatgaataaaacacaagtgtgatgtgcttcattccccactcactgtttgcaaaactattttcctgcagttcagacccttaagatactgtggaactggaccgttttcctgtctgtcgacttctgaattttaagtgtttttcagaaagtctccatcatttggaagtcacgctttgcctcctggaagctgtctagacaggtgaccagttttcaccaatttgggggctatggaggcctcttccaaggctctctgccctctccatgagccactttagctagatgactgtgctggtatcaagtgaaaaaacaaaaagaatacttcagtaatttaattcaaatttgttcttgcctagattacggtaatgctcctatttagaatgacttaattcctggcaagtggattgtgggaggttaaggagagcaccctggctccagagcagagagcagaagagggtgttcttgctgtctgtgctgaggttggctaagtctttctctttttcacgcctcgtgctttttgctacgtggtttctgctgcctagctagtcatctgcaaggcatcactgtagccctatcctgatgccctgagtcctggtggcttctactctgacccttcctgttcttttatagattattccatccttgaccacattttcttctgttctcctgtgtgcctagctttggggaaataaggatgagtcaggtgcaggcttcggttgctcatttgaacagtgattctgactactgttagagaagggatatgggagagaagtgcaggggatttacttagccaaggctgaaggcagagaaaacggtcattgctgcatggcacagctacctgtggccagagaggagccatggcccagctcttgctgggctgacccaaaggccgaggaattttgtgtgccaggcacccatctgtgacacaaccacgtgggccaggaagctgtgtgtgtgtgtgtgtgtgtgtgtgtgtgagcaattaatggacaggatccagagatgctgagagcagtcctgcacagtgaagacagtatcaatatccctctccctgagaaacccaggagacccgttcctcatcatcgatatgcttcaaggaaggcataacaaattgatttgtgtaggaacttgaactggattcactgaagaatctcaggaagtttgtacttttttcagtttgggctttgtgatacagaaacacgcagatacttgtgggaacaacgtccctcaggcgttaaattgacatttgggattgagtgaaccgaagcattggtggtagagatggggaatgctatctgaaaaaccagaatcagctttaaggaagctgattacaaagagaattgattacaaaaagtatttttggatttaaaatacataagatgtaggcagtcctaatttaataagatataagggattgaagcaattgttgccatcgtctttctttttgttctggactgctgtcacacacaccatagagatgcctccttgagtgtcttcaaagtgctgtggatttcctttcttcagccgcctccgaccatcacgtccagccatctgtcctgtttgatcaagtccgcagagtgggtcgaggggcaccaattggcagaactggtcttggtgcattttcccctatcaagtttatctgtttttccggaggctgtttggctcttccccaaatcttccaaagacagaacacttaagtctaaaaggaggatttgtggaccatatatattttagctcaaaacctccaagtggaatcattttaatgtgcgttttcttgagaaatatgtaaattaataattgcttcatacattattcaagaaaaacttattttgtatcacccataactcttctaatcttatataaagatatgctaatggatttaattaaaataattatactgaataatgtagcctgaactttattctaaaatagcatctattaatcatcatcatcagtaatatttttagccagagagacacttacaaccttaagctgatactagatggaaagtgcatttattgttttatttttcagtttggattaagttggcattctcatgagatctgggacaattacatttgcttagagacgagtataaaatttatttctgggccgggcatggtggctcacccctgtaatctcagcactttgggaggccaagacaggtggatcacgaggtcaggagttcaacaccagcctggccaacatggtgaaaccccgtctctactaaaaatacaaaaattagctgggcatggtggcacacacctgtaattctagctactcaggaggctgagacaggagaattgcttgaacctgggaggtggaggttgcagtgagccaagattacaccattacactccagcctgggcaacagagtgagactctatctcagaaaggagaaaaaaaaaattattttatttctttaacctgaagtatttcagcaattagaaaacttttagcctcttctgccctttcctgtttcttcttttccctctaaagctttggtttcagtgtgttcttgtccttttggttcagttttgacctcagtttccctcccaagagttgtgattgctgaatacgatgagttcctgattgcctggatattaagaggtgaaccaaatcttaagagggacactcagcagcctgcctgtcttaatataaatagaaatagttttaccactggctgtgattctctctgattttgtttgtgttatctttctgtggcttgctggctttccatcagtgctcaatgaatggttgggagcccttatgcatttggtggtaatttcagtttctccttaggcctctctcatgcctgagtgtgcatgggacccaggtatgtgttcttggtgtgtcagtgggtcctgcacacgtgttgattggtccgaggactaaatgcaggtagaatcagaccgtccccccactggtggacagacgaaagctttaccaagttgatagaataacataagccaggacttaaactgccattaagttattttacctaagtttaaaataaaatctgaagaaattacttgcttaaatagcaaacatttatttggtaagttcacttataacttaatgaacaggcgaagagtaaagaaagctaaaatcagtgacttcctctaaattgtgtatagagtactcttctctgttcttggctgggccaggccataatggtgtattcgtacagtttcatggtccatggttcatacctctggggttggggagcataagtgggcctcactccaaactcagctctgtcttttggggacatcccacggactttgtcctccttcccactttcgtccctcacccccagtgaactgattagtgattatcccgctctgctgcagggaaccttgccagtgcctgggaggcaccgtggagcagatacctgctgagggactggcatcctggcctctcacccacaattcaaaacagctttgcacattctgagcacagttttatttaaataaagatcttcactgatttacaaaaataacaaaaggcaaacaaaaacaggaaaaatcttcaatgtcctcaatttctatcaccctgatcttttttgtgatttgggaactgattctactcagtatttgccacaatgaagatggcactttacaaatggaagtttgcaccgaatgaagattcaggtttgagagatgtgcacgctgaggaggttttccatgtcaacacgtgcatgggtccacacgctgtcctgccgccactgctgctggtagctgtggccaacgtctgttgagcaggagcaatgagtcgagcttatcacatgcacaacacgtcattccattctcccacagccccttgaggcaggccctgttgatcaccactgttttgcccatgagaagcccgataggaaatgctaccttcccaaattcacatagcgagtgatggaggagcccggacagcaccccagagccctgaccttgtctaccatggtgctgccttcctttgatggtgctggttagggtcccccacatgcattcatagatttttatttttggaggtgtctttcggcagataagattccacgcagcaccatctatccacagggcagatgtcccctgcttcgtctgttgggtgctctgtgtcttgacaagctattgaggcaggagctgtttccactcgaaagagacctgaatttagtgaagcagccagactccacagaggaaactgaaggtttttcctgcaagcacaagcagaatccaaaacacttgaaactctgacaaataaccaatattagaaatgaatcaagctaggtgtggctcttacaatagtgggtaatggaaccctcctgccaaggaaagccagagcctgtggtaggaaggaatctgagttccctttgcatcttgtccttgtctggctaatcaaactggatggggaagacaactttttcccttagttaaggaggtgatttctgtggctgaatgcagagagaggaatgcttcttgaaaataaagaggtcacgactatatatgaagtttgcagtcagtttgggagtcatggagggtcgacttcccaatgtcctctgtgaggacagaaggagacaaagcagactgaaatagtctctgtccttacctgtgaggagcttattgtctatggggaatacggacaaattgaccttccattgcagtccaaataggaatgtctctagatgctgtattcatctcttttgcgttgctataaaggatacccaagcctgggtaacttatagagaaaagaggtttattttggccccggttctgcagggtgcacaggaagcatagtgcagtcatctgcttctggtgagggcttccagaagcttctgctcatgacagaaggtgaagggggagcaggcgtgtcacatggcaagagagggaacaagagagagcgcagggaggtgccattgtcttaaaccgccagctctcacgtgaactaatagagcgggaactcactggttactgcgaggaaggtatcaagccattcatctgaaaccctcccctatgacccagacacctcccactgtccccacctccaacactggggatcacgtttcagcatgagagatggagaggacacacatccaaaccatatctgattcctaacctggcacctgtgtgtcctggacgaaatgatgtctaagctaaggactgaggggtaccagagtctaactgtgtgtttggggtggacttgggtggggcggcagagcagtgactccagaagagggaatagcatgtgctcaagcctctgagctggcagaggggcctggcccacctgggaaactggaagaggctcggcttggtgggagagagtcctgcaggtaccaagggtgagtctggggtggtggggccagagcccatggccctccatgggtgtgggataggttccctgtgtcccatgagcaggggacgttgccacagtatctaaattccatttgcattttcagaaggctgctctggctgcccagtgaggagtgtccttgaggggtcagcgtggaggcagggagggcgggtaggaggctgtggcagcaaagccaatgggaggcagtagccgtgcggcccaggtgctgtttgttccggggggagttaacagcctgaaccgagggctctgtcgctgcctagaagggggctgtgaggaagagagaacacccggtgtgatgcccaggcctgtggcatgcagctggggcttggcggtgcagcgcctggcactggaatccctagggaaggcgaggcagcggtggcttccaccaaggcagggggagtttgcaatgtctagggtcagccagggtggaccccggtgggtgtggggtgtgggtgttgggctcaggaggaaggggagccctggagatggatcagaattgggagtcattggcatggcaggaggtgaggtcccttgtgggatatgtggagggaccccgaggaacccacaggcaaggggctgggggagcagggccctgcgcagggagctggaaggagggtggagaggcaggtggccaccctgggagtgagggccacgcgtgccccagaggtgaggtggccaaagtgtcatcagaaaggccacttgagaacagcctgaagtcatcgtggccttggcaggaacagagctgtggtgcgggccggagtcaggctgcagtgggagtgaggaggggtcgtgtgggaagtggacgcaggccttgcccacactgtggggtattgtccgatggagcagaggctcgcagggcctggggctgcttttccgggtgagaggctggtgtgggcttcatgatagaaagcaggaggcagaggggtgagaactgaaggctctgaggagagagagaggacaaagggcaggagggccttgagcagacagcaggggaagaggttggagccccacagggcaggcaggtgccccgaaaacccaaggcaggggcagaggttgggagctggagtcttgtgtttggtttgggtggttggaagcttagcgagttcctttcttgtggtggcttttgtttttctctgaaggaggtggtgacatgagatgggaggggtgggggtcaggcttgagaagagcaaagaaagactgagtcagccacaggggagagtggagaaggagaggaaacccggcccttcaggagaacaggtggacccacagtgtaagacgtgcctctcctcatgtttcttctgaattccgttctctctgtcctgtctttgttctgtcacccaggactgatagcagatgcgggttcctcccagttcttgctaaacctcatttaccgaaagacacaaaatcatcttggtcggttaagcagaattctggtttaatcagcattttgggatcactggcattccatgtccccgcctcagggggcacaaccccttctctgagggtgtcatcatgacatttttgatgctaggagctcgggaagaccacggcagggaagactttgggagccctcgccccgcttggcggtctgtcggtcccgattcacacagtgtccggcagcccaaggggagccagcagcaggtgggccataaaggcctgtcttgtttgtggccgattcaccctggtgaaatggtatttatgaacttgctacaggcggttgatgctttgctgggcacagtataaaatgcatgaagccagttcgtgcctcaccctctgggcgttcgcaagcgaaacgagagaccgggagactgagcaatcagcctgtgtgaacgctggctattaaatgtcacaataaatgttttctgttttttttcaaagcaacactgaggttgtggaagcagaacatttgaaatcagaatgaaattattacgatttagtgctcttttgaaaagttgcatcccaaagcagacggttgggatctggtgggccttgaaggacagggcaaacactgaggtgaacaacagcatggatcgttctggagtggagatttatggggctaaagttgctttatcctctactctatttttggtgaagttgaagtgtggcggttttgcaaaattagctttggggctgcacagaccaaccccaaatcccagcagtgctgacctgggccaaagacttcactttcacatgtctccactgtctcctccgtgaaaggggatagtaataggcctccttcatcaggttgccatggggatgtaatgtgtccatagagcccagcacctagaaacttgtctgacaggtgcagaatacttacgtcatagatgaggcaacatgaactcacttgaaatgacttgacctgtgcaccagagttgagacaccagcctgccattctttcagtcatttcccatcccagatagctatggaaatattcccaggtaatatattcttagtcacttaaaaaattaaggtataggctggacacagtggctcacacctgtaatcccagcactttgggaggccgaggtgggtggatcacttgaggtcaggagtttggtttgggtgttgaccagcctggccaacatggcgaaacctcgtctctactaaaaatacaaaaattagccgggtgtggtggcgggcacctgtactcccagctattcaggagactgaggcagaagaatcacgtgaacccggggggtggaagttgtagtgagccaagattgtgccactgcactccagcccaggcggaagagtgaaactcagtctcaaaaaaaaaggtacaatttacatacagtaaaatttattcttttttaatgtacagctctgccagttttgacaaaggcataatgcattcatcccacgggagggcccctgagccccctgtattcccctgcccgcttccccaccagccactgacatgctctccatttctgtagttttgccttttccagaatgttatgaaaattgagtcacatgggatgcagcctcttgcatatgtcttgttttatttatcactgtgtcgttcacgtgcatctgtgttctaggtaacagtggttggtgcttcttgttactgcgtcgagttccattgtatgaattcccctcttgaagggacatttgggttgtttctagtgtttggagattacaaataaagctgctagagacgtccacataagggttttgtaaccgtcataggtttcctgtcccatgtacgtgccaagtcaatgtgctgcgactctgggttgcagcagagaaagagttttaatcgtaggaccgccaaaacaggagaaggaggaaacctcatattgtctgctgcaggagtttggggctaggtattgttaaggttttcggagcaggcctaagtgggttgaagagcgtggggtgaagggacagggagatgaagaaactgcattgcattgctgattcctttcctctgtcgggggttttcaaaccagttggcagcagcagtttccctggaattcaggatctgagaaacaccttaagcaattcttaaacaaaagacttatgattctaatgtcagaaatcctatctgcaggaacgttggggatgcagatgaccagtatctagtgctgcgtgactttggattacgagtaagtgggctgaagtgcagcctgttccgtgcttaattatcactgtattgctgtccagagttcttgttaaccttatgaggatgccttcagtttttgtgaatgtaggttttcacttcatttgaggaggtggccaggagtacaatggctgggtgctacggattatgaatgtttacctatgagaaactgctgaactctcttctaaagttgctgaactatttttgcattcagactagcagtgttatacaaagagcatgttgtaggaattctgttttgttttcatgattcttatagatgttgcttgtatcttattgtcattttaatttgcatttccctgatgagtaatggtgctgagtgtcttttcaagtacttatttgccatccatctatcttctatggagaattgcctcttcatctcttttgcccattttgcagggaggggaagattgttttctcattattgagttttaagggttctttgtgtattctgtgtactaatctttagcagatatatgatctccagtcattttctccctgtgtagttcatcttctgttatctcagtagtacctttcaaagagcagaaattctttattttgatgaagtccaatttatcaattttttcttttacacattgtgctatttgtatcatatctaagaaatctttgcttagcccaaactcacacgtattttcttccaaaagttttacagtttttgaagttctacatttaagatcggtgatctatttaaagttgagttttgtacagtgtgagagaggagggcatgaagtttatttatttgctcatggtactgtgtacctttgttacaaatccatcaaccgtctgtatatgttcaggggaatacttttgaagtgagtttctgcctacttgcttttggagaacaattgtaaaaattgtttctgtaattgcgtagtattttccagtgttcaaagtgttaccctattcattttccaatttgattttgagctttattgcaattccttgaagtatctggcgtgaatgttattttccctcttacttaaagacacaggtagaaggtggcagagccagagtcagatcacttaaaatctggcaacttttcccaacagaagagagcaaagggactcagggtctgactttcccccgactgaatttaattctagcttagttcagtactagctttgtgaacagggacaaagtaattaatgtctccattgttggttttttcctccttcctactcagctaccttctaataggaggtgatatggtttggctgtgtccccacccaaatctcatcttgaattgtagctctgataatccccatgtgctgtgggaggggacctgtgggaggtaattgaatcatgagcagcaggtttttcctgtgccgttctcatgatggtgaataagcctcctgagatctgatggttttataaggcgcaattcccttgcacaaactttgttgcctgctgccatgtaagatgtgcttttgctcctccttcaccttccaccatgattatgaggccttcccagccatgtggaactgtgagcccattaaacctctttcctttataaattacccagtctcaggtatttcttcatagtaggatgaaaatggactaatacaggaggtctgtaagaattaaagatcaaatatacaagggtcctagcacagtgtgcagcatgacaggatctatcattaatatcattactctgttttttgagggtgtttgttttctagaagatacattactaaagaacaaaatgattcataattaaaatatatgcagatatacaggaaaacatttttggaatggaacaaagacagttgactttaatcattgaatgtagaagagttgaagtgaatttaatggaagaggattattctgagggggacaggtcttcattttgctttatcctcacagagctctgcaggggtaaaaggagaaaatcacatgcatgcttagcacacagtataggcacttaggccacaggtgataagtgttggcttctgttaataataattttattatgtgtcaggacaacctgtgagaagttagcattgtttgagcattctttgtaggttagagattcattttcttttttgagacaggatcttgctttgttgccggggctggattgccatgctgtgaacacggctcactgcaacctctacttcctgggctcaggtgattctcctgcctcagcctcctgaatagctgggactacaggtgcaagccaccaatgcctggctaattttttttgtatatttttgtaaaggtggaatttcgccatgttacccaggctggtctcgaactcctgagctgaagcgatctgcctgcctcagcctcccaaagtgctgggattacaggtgtgagccactgcgcctgatgacttttgttctttgctctattttcatcgtgttagccgtcagcccctcatctggaagtgatctttctcttctcagtatttctgcggttcttctcataaggattacaaattggtatgaacactccctaacctgcatgctgctcagccttcttgtttcttgatttgcagggggcagcactgaaatacttaccaacgatcgtcaacgatgtgaaattggtgtttgatcccaaagagctcaggtaagtatgcagcccaggcgaatgcttgtcacgtgccgtgtgtgacctccttctcagtgtgcttagtttatgggatgctcagggttctgcctcatgtctccatatgtcagtgccctggatcattctggaacatgtgttgctggtggtgtctgtgactctttgataatcatgacattatgtggaaaaggtatcaccagtcaactatgacaacattttttaagaagattgtttacagtctaattggtatataatgtccatttggcattttgcatactttgaggtttgaatttcagtatgtggttgttggttttgctcttgttttcagcacctaaaaatcctgacataggagctttaatattcctgcgccggcttctgcttctgtaatagaggcaactcctctttgggaggggccctgagcctcaagcagaagactcagaagttactaagaaaataatttttagaaaaccccacaaacaaactttgagaaagctggtcactgggctttcagaccaaggagtgagattggacaccaaatccttccttttctctccctaacttgccgcctctcagtggccaggtgtgctgtttgtttcctaatctgttggtatcactgcattctgaaagtgccattgtgagcaaatgggatacacagcctttttaatttattttttaagagataggggtctcactctgttgcccaggctgtagtgcagtggcgcgatcatagctcactgcagcttcaaactcctggcctcaagcacccctcccgcctctgccttcaaagcactggaattaccgacgtgcgccaccgctcccaccccagggatgcacagtcgtttaaaccccagacattcaatagcacagtcctcaactactttttgttttggttttgatttgacacaataaactacctgtgggtgaagacaccattttttaccggccaatgaagccctcctaaatattagtaaagggccatctgtccactgagcggtgaaacggaataaaaaatgattatccttcctgtactttatgtctaccataggtcactcgtgccctggaattgaagggcgaggggctctctgggaggcgctgtcccccacgaatcattgtgaatctgatgttccctaggatttagtgtcctgcagggaaacatttattttctgctcccagggcaccaacagtgctggtcataagcttagcaggtcctacatgagaaaaggagaaacacacaggctcacgggcggtgtctgcccacctggcgcgctgtagagtcctctccttggcacatgcttctccaagagcgggccccaaaatggcagctccggtagcccttgggaacttgttagagaaagccaaactttggcttcctccccagaccttctgaattagaaactgcacagtggggcctggtcatttgattttaacaacctccctccccgtgcaggtgcttccagggctctctcatattttagtagctcaggtcttgaaaaactgagaggaagcagagaaagctgcaactggtgtgggctgtggccatactctaggcctgtctcatggtgcacacagatcagctccgcacccgcggaggggtatcgtcgatactctcagtttgcgcttgagccgggcctgtcctcactgtacgcacaaattagcccctcaccgatggagggtatcattgacgctcacagtttgtggttgagccgtgtgcttggaggtcctaggaagacctgcttggccagggccgatgcaggctgctgctggcctctctcagatttgtgcatccctgtgttcctcctcaatgcctgttacactgatttttaaaaatgacattgaaaatcacatacatatttgtttctatttagaaaattggttcatgttttaataaacagaagagatgacagaagagggtaactcaaacttaagtccactacccaaaagaatcagaaagtgctggatcccttacacacatacgtacacacacacttaaaaaagtcaccattttttggttaggcatggtgactcacgcctgtaatcccagcactttgggaggccgagggggacagatcatgaggtcaggaattcgagaccaacctggccagcatggtgaaactccatctccactaaagatacaaaaaattagctgggcatgatggcgggtgcctgtaatcccagctactcaggaggctgaggcaggagaattgtttgaacccagaggcagaaattgcagtgagcctggatcgcggcattgtactccagcctgggtgacagggcaagactctgtctcaaaaataaaaaaaagaaaagtcaccattctttgtgatcagctcctgcacttaagacatcttcctctcccatgccacgagggcatcttctgcatcatcattgttagtaactttcatgccgatccatcccatgctggcctatctttaagcagcaacaatagacgcagcatctattatgtgctttcaccatgtaaaataggttttgcacaaagcacttgtattagtccattaatctttacaacaatggtatgacataggttctattgttagccgaattttatcctcaataacttgtccatgataattcagctggtaaatggcagtggttcaaggccaacccgggctttttgaatacaaagaacaggcctctagctactgtgctacctgatggctgttgagttgtattcaagtttttttaaaaaaaatatattataaaatgctaggataaaatttcctgtagcttaattgtagtttctgctcctattttatatcattaggataaaaagagaaatggcattacttggttttgcattttcttaaaggattttcagtagattttatctactcgtccccctccagaaggtaaaaccaacattctaccagtatacgttggtgtctgttttcccaaaatattgctggtactgggaattaccattttatagaaccttgccagtatgactggtgaaaccgtatctgcccattttaatttgtgtttatgtagttactaacaagagctcttctaaaatttcttcataggtctgttagccttttgtaaaagtgtatttttaaaaaattgctttattgtggtattatttacaaacgataaagtcacctattgtagacggttcaattcagtggtttttagtatatttacgaagatgtgcagtgatcaccagagtccaattttagaacatttttataaccccagcaagatcccagtgtccatttctggtcatttttccttcctagcccaggtaaccccgaatctcttttctctctctacacatttgtgttttctgggcattttacagagctggaatcatacaacgtgtggcctctgtactggcttcttctacttagcataaagttttcaaggtttctccatgttttagcatcagtgcctccttgtttttggaaatgaattgtgtggctatactgcattttgttcatccattcattaactgatggacttcgtgttttttttactttttcagtataatgaacaatgccacttggattcatggacaaattgttgtgtggatatatgttttcattttttctcggggaggtggtatatgcctggaagtggatggtgactatgtttgacattttgaggaaatgcctaactgttttccaaagtggctgtgctgtgttaccttcccaccagcttggtgtgactgttctcatttcattatatctttaccaacacttgttattgtctgtcttttggattataggcacgttagtgattgtgaagtgaaaacgaacactttcaaaacatcatttcttggaatgagttattgaccccatagtgcatgagaggctgtgttgaacatactggtgacattaatgaccatgtgatgacctatatctcagtattgtaacaacattggatccttttgctatgtgtctcaaaattatttcccttgtgtttttcctcacagcaaaatgtttactgaattcatcctcaatgttcccatgggcttgctgaccatccagaaactctactgcttgatcgaaatcgtccacagtgacctcttcacacagcatggtgagtggaaccccaagaattattcacttgtcctgttatttattttctgaagacattgaccctctgaattgcctcttcttgacaaaaggagtagaggctgcaaccaattaaaactgctgtattacaagacaggaagatttagcccttacaagagaagggtaattgacatgtaatgcaggtaatagatcattgagaaatgaaggcaaaagctcgtagtttgtaatttaggtatacaccaaagtcctagggtaatcagcatacattgtagcctttaagatatgtggttgtctgtcctggggaggcaatcacttcgctccattgtgatgattgcaaggaaaagaattcgagttttctttaaatctgaaagtaatggttttatcttattctgaactttgcattctttgacagcatttcttcaaatcctactcaaagtaataagaatttcaatgattcttcaactcatttatcctgcagaacactttatatttccctatgttatctccctgccctttttagtaatcattttttttctatttggacagattaaattaatattttacccttgtcaagcagttttattgaaagcttaaaacctctgcataattccacaaacttcctcatttattggaggcaaatgtgaagtctgttgagtgacattctgactgagaagcatggatttattcgattccatttgtgcctggacatttggctgctccattcattttctgttgtcctcattcttggtgttgttctcagttcccctgtgctttcacggatcccagacttgggatgtccctgttaagttacgggctgggtttggaacacactctgtgcttggcttggtcctttgtgccttctgggatgcgaattttaatcttctttcttggcttaaccttataaaatgcaccagagtgtacacgtgttgctaaggctaatattgaaagaaaatgttgacttcatttaggtgagagtgttcttctctagaaaaaaacacatcaaaccaagaagtgggtgactttctgcagcccctccatgtagacctctctctttagtcagaaaccacttcttactttcataaaagaaagtcagttctcaccatggtctgggactcaaagcacatgacgctccattgagctattattcctgactgtccatatttcagtttctcactggaaactgaattgcccactcaccaggtgttttccaagacttgggtactctagggggcttaaggaaaggctgatgatagaggtgatggccaggcaccctgcttcagggtttcctcctacagtgaataagctttgtaccacagcaagtaaaatcctccgaaaattttatatctgggtcttattaggtgggttactgatgctcctaaccattcaatgccaagacacacacagcgacatactgcatcaccagcactaccgtcatcagtatcttcatcaaattaacagctgtcaatgagtgtcaaccgtccatgaataacaattgttgtaaattgtcgatgaattgtgcttgatttttcttaagtgttgatttaacgaagatcttcttcaggatatatttacatatatttttaaatttctgttgcaaaactttgttctgtatgtcatttagtttctttgaataaggatgtaagccatgaaagattcaattagatttttttttttttttcgagacatagtcctgcgctgttgccgaggctggagtgcaatggcacaatctcagctccctgcaacctccgcctcctgggttcaaatgattctcctgcctcagcctcctgagtagctgggattataggcacccaccaccatgcctagctaatttctgtatttttagtagagatggggtttcaccatgttggtcaggctggtctcaaactaccgacctcaaatgatccacccgcctcggcctcccagagtgctgggattacaggcgtgagccaccgagcctgaccccagatattttttcctctattaaaacttgctcatttctttaggtcgtagaaagcttgaaggaaacttactgtttatattcgatgattttgttagcttaggtgtttgtaattgtgttctgtccctctttcctatgccccatttctgtttcattcttgttctctaagccttttatcttagacagcctgaagtcctgttttggaagtatgcaggatgtgaataactgcttagctttgtttaatatggaattaccaggtcatgtaatattttgaaataattaacctgctgtcatctttttaagtacggaattaggattttgatcttagtataagcaagttgtacccaatgtagtaaatgaggttgtatgaaatatatgaatcccaaattattgtgggctaaatgaaccaaaattagcccgaagcttcgtgtcttacaagcagccccagaattgccccatcagtagaagttgtctaagctgtaactggcagctcaaatgtacttctaaatgcttagtggttgcctagaagcatttcggaatgctttggccaacgtgaaaatggtcccatttactgtctttgagttttaagcgtttttcttaaaacaacctgtttttctcatctgcaagctctctgcttgttcaaagcagccaacagacatcttacctcctggtcaggagagatttatcaccagaaatcttccagttggtccattcttacaaaagatgtcattacttttgcaaaatattctgtgccacctttggtataacaatttaaagccaaactgttttctgatgagacatgttgaatctgattttcatgcttttttcctgtttcttgttaatttgtacaaatgtggttgtttttgtcctgtttcctgatcccagtggaatcagtcaaatgaactctctttgtgttcagatttctagaacttggtataactggatttagctgcatgtgccactgaatgcacttgcccttagtaaacatcctctggaggatgtgttcagaatgtgtcactgtatgtgtcctccaggctccttcgtgggggctccctgggtgaagtgagattcccaagtctttgcttctcagcttgtgtgttgccttactcactgaaagagacccactggttgctttgcactaaaacatttctttttatctccgcctgatataatgacaagtagatctgtttgcaagaggctggcagtgaattctgaaactggtgttgttcctctgcagaaaagcctttcgttgccaggtctgggtcccagtaggccaggccttacagtgccttggttgtttctggccttgttttccccatttctctctcttggagaacatggaaaccgtaggtgcatcctgagtttgttgggcttcataggaggcacgtctttgggcttgtcaaagcaagacagctctgtgtggtccagtccatgtgggactggcctgaatgaggacaccaggcctgcgtcactgcggccatttgctcacagagcattcagccttcctctgcccttctgttctatccaggccctcaaggattagatgatggccacccacactctgcaggatggacatgcttgactcagtcccccaatcccaatgctaatctctgctggaaacatccttacagacacactcagaaataatgttcagccagctctctgggcatccgtggtgcagtcatttggcatttaaaattaaccatcacagagtatttcttccaagaggcctgtgattgccctgcttaaaaagccccctacatgccacctcatggctcctcatggcacgccccccatgtggaatcattgtatttcttacttgcttatttgtaggccttccataggatgagaactttccaagctgggccttgttcatctagattttgctcttctgctggtacctagcgcatgcctggcttcagcatgcctgtaatggatatttattgaatgaatgaaatgcttatgggtattcctaaccaggaggcagtacagagaaagaagcaggaccagctacacacatgtgtagttgacttgattgaagggaggtaaaggtttggattcacatggggaaattggcaatctttccttgtcttagcattgaatgaattgatcataggggagaaaggagaggtcttagaggaggagtaacatcaggagcaaagggagagggagaagagtgagagacttgaggtgtgaagagtcttctctgagcagttttataaaatcaagatgctcttctatttgcatctgatctaatcattcctgttttctggaaataggaggggggtgcagttcagatctgtgcattcaagataccttttggctatacctttggctaaaactatggaaaatttcaaatatacaggagggcagagagaagagagtaatgcatgccagtgtactcatcactcagctccacaaattatcaactcatgatccttttttttctttcttttttttttttttttgagatggagtcttgctttgttgtcaggctggagtgcagtggcacgaacttggctcactgcaacctgtgcctcccgggttcaatcgattctcctgcctcagcctcctgagtagctggtactacaggcgcatgccactacactcagctaatttttgtattttcagtagagacgcggtttcaccgtgttggctgggatggtcttgatctcttgacctcgtgatccaccctcctcagcctcccatagtgctggggttacaggcatgagccaccgcgcccggccagtccatcttttcttatctatatgcccgtcccccagatattttgaggcaaatctctgccatcacagcattccattttttgtcattttaaatgtatggtggtaatacagagggcaaacagtgttcctaagaagaggttgtgcagaggagctgatccccatgctgataaggcatccaccttggatgttcccacccctggccctttgctgaggtagagggcctgtgatgcattagcatactgtgtgtgagtcagtgaatgggcagtgtgtgtgagagtcaataggctgtgatggctttaagctttgtctcgccatgtgacttgactacttgaaagctggttgatagattacatgcttcaccaaaagatgactcttgcatataatctgtggtgtggagtgagcagattttcaaagcaagatagatacaaagagaaggaaaagtcaaagcttcatcatttgtgcatttgtagctttgtttccatgtgattatattgttgcccacatagctgacaaaagctgtgaaaattaaagcttaaatcttatagaaatgaaaagttttagtgtaattaaacactagaacactgacgtttaggatttaagctcacaaaattgtgtaacattaatgttatagaaattggaataaaatgaatcaagctgagctaacattgacttttaagttagtaaagagcattggctatacttgtaagaagcctttgagtggaggtgagagtcctcctggaacatgttctctcacccactggcccctttctgaatctgacagctttgggaagcttgtttcaatgaacactgggtcacttatttgctttgcaaggtataatttttccatattcccatttctatagtggccaaagcagtggacaggttttctttggagcttactgtgtacttatcattttgtcctcacttagtttgttttggatgggagtatgagactttgagagtaaattttagtggtaaggctacccctttttggtcttgcaaatagttggatactctagatagattgcttttctgtaagcctgctctgtgtagttttctgtttgtctgtttgttgtttttctggtggttggactctggcagtgagtaggaatgggaaagaggccattccctcataccctggctctcctggggctcctcccttcactatagcaaacaggctccttgtagacagtgttcatgagtcttttcaaacttcatttgctttcatttttgagcttcttgaaagtgtaagcctggtaagtttaaattattttccttattcttattttcaaggtgaatgattcttctagttatcaagcagagtaaaactctcctttttaatggtggaaacattagttacagcagccctttgaaatctgagggcaaaatcccagacacttactgggactagctattaggaaatattgaagtcagatttctacactattatcattgtgatttgatccatgatagaaatttatatctcaaaaattaccctattaataaacttattatgccttaaattatagaaaagttgcgtgtttaaaacaaacccataatataccttcttaatgttttgataaaagcatttttgattaaaaaaaccaaaataaaatctcttgagctttactgttgtggaaaatagaaatatatcgaaagggatcttaaacctggagctactctgcagtagttttgttaacttgatagatgttgtgcagaaggaaaaattggggttggggtcaattttgccacattcacttaatgtaccactcatatagcattctgcagtactttaattagatagttgtgctgatgacttctgatgaacggtaccagctgtgaaccctgaagactgattcttttaaataatggtggaatgtaaacatcattttctcttctgtttctttcatgccttgagaaaactttttatctgtaatactgcacctttttcatccctcattctgtatatcattctctgtctttcattatatatgtttttgaaaagaccatttgttataacactgcaggattttagaaatgacttattgaatgtaggagggtgaactcaatttcaggtttttaattgtttctgtttcaattccatcataattcattgaatatcttccgtgtgctcagaaccattgattagcgagtttgcttcctttgagagtcttcagagtcatctacttaaaaatgtagaattggaaaagagtgattatctcaatgctcagataaggacaccagagttcagccagaagcctggcagggagctgtccaccgccgtggtgctgattgaggaggtggcttcttacaaatctatcagcccactcttttcttaaactgtttcacacccaccatatgagtaatgcattctgaaaactgaatttacttcaaatgccatatggagcaagacaaaatacaaataagtgaataaataaacatacaaataaattaaatgtataaagtatacagtgttgtgcttatatgttcatggagttttaatagtttttctcttctttctgtgtgggacctttatctgtgatcaaattggtggtgccaacagtttatggtatagttggtgtaaactttatcatcgtctgttgagttctgctgtcacttctgggtgggcttctgttcctgttgctggatgttgaatgcaagaagaacgatctgagaagagactgtgttggttgtgctgtatttagtcatgtgcacactgggcaccaggaaagcaagtccctgagtctctttagtacatgatttcttctagctcctggtagctgatttctgtaactgcatgatgtgttgtctacagtaactagcctgggacagtggaaagagccccaggtcagcatgcagtctcctaggttctgctttaggacctctgtcttttcttgggcataaactcctccctgggtgcacagtccttccgctaagatgaactgcaacacaatatagggttttgacatatgtattttattgtcagagcaaccaggaggggagtttgtgcaggaccacatgggccaagacctatgtttttttgctacctttattctcctggtttaaaaaatacccaccattccacagccctgtatattctctctcagttttctcatcctccatgtggtgagatcctgcctgcagactgacagccctgtaaattctttctgaacttaacacaagccacatccttgatgtacccccttccacctagaaaacagacttcctgcctgaccaattcttctcacacagtgttttctgcatttttcttgcatcttgccaattttttcatctactgataaatgggactcatttgcaatttttctccattggctcttctttaatttcttccctctgacaacttgttactaacagagtaatggaagtttaatccttagttttccagagtaaaagatacaaaatatctgctcccccactgccttcctttaaaggatggctcgcttttttacaaagccttgtgccgatgtccagaaaacatatatttgacaaacttctttttcctgttgttcaatagtccacgtgctactgtgccccctccttccaatttccaacacccttttacttgctctgtcaccttttcatttcaaattccatgatactgaatacctcaagagtgaagtgcagattaccgcatttctaacaatttcagccctctgcccagtggccctgttccagtcagaacacgtaaaaggtactgtcgggcagcttggaacagaaacactgtacaggccatttgtgtttactccattttacagactaggaaactaaggtgcagaaaggaaaagtgacctaccaagggtaacttgatgttgatttattctctggtactgctaactttcatgacttgttaggttagaatgattcttgaaaaatttgctttgcgtctgttatgtaaaaatgcctgaatcatacaggtttacacacacgtgtacctgcatgggtcctttactctgggggctccagctgaggaatcaggcttttttttttttgagacggagtctcgctctgtcacccaggctggagtgcagtggcgcaatctcggcttactgcaagctccgtctcccaggttcacgccattcttctgcctcagcctcctgagtagctgggactacaggcgcctgccaccgtggccgactaattttgtttttgtatttttagtagagatggggtttcactgtgtcagccaggatggtctctatctcctgacctcatggtcctcctgactcagcctcccaagtgctgggattacaggcgtgagccaccgcgcccggccggaatagacatctaataattctgactccgatggtgcgtagaggtgcagtcctgaaggtcccttcactcagctcccagctcccacatctgtgaagtgtggggctaaggagatggctctgcgattccttccagtgtcggcaccgtcttctgtatttctgttgtttgaagacttgaatggagggaggaaagcacgtgaacatgttgaaacctgtgggtccaggattcttagatggttggaaaataagacaattgactatacaagatgaatagcaaacaccccccatgtatatgattcttactgtttaattcttaggaaaagtgttattctggatctcagttctatgtaacacagagttattaaatgcactttatggatcatttatttaatgtgaccaaactaaaaattaagaagtacattactctgttcataaaaatgaatgttttcaatggacaaattcattcttgtatttgcatcttgctttaatgtagagctgtaatggggttatggtcagatattctgcttgggcatttataagctgataatgcttattgaataccttttataaagattaatattttttactctgtcctcattaccagagcattaatcatcctggcttcggcccttgcagctgaggatgaacagatgttgaattattgctgtctgtaatcattgtggatcacactggggaagggccgtgaaagggtggctggtgtgatcctcacagctgatttgcatggagcctggctacctttatagctctgtgcatggcagaggaaaccaggatagctgtgccagctgattctagcttcctcgtaggtcaccgtagcctaagtcagcactgacaagcactggcggtcctggagtcacgtacgtgtgacagggtgtctgataagagagagctgtggccatgactctgcttacaataaatgccagttcataaaaatgagaagtcacatacaaggtctttaacatcggctttctagcattctctgagactgtgctgtccagcagaaatagaatgtgagccgtgtatgtaattaaaaatattctagttgccacattttaaaaaatgaggcaattgatgaaatgaattttagcaatgtattttgtctaaaacatcactgcaacgtgaattctctctaaatattactaatgatacatattttacattctttttatgatatgaagtctctgaagtccagtattttacacttacagcacatctctgtttggatgtgaaattttcaccagacacttgatctttattttcatcattgaatataatttacctttgaaaaatgagattcacataccccaattgttccaaacattggtttctaacaagtaaatcaagtagcactttttacatttgagtttatattaattacaattaaataacattaaaaattcctttcctccatggcactaattagatttcacatgctcagaagtttccatgttgggtatcacagctctgaggtattagttttcttttgtgtccttttagttgaacagctgactttgtataatactataccttctgttaaccaccatttgttgtaggctcatatttgctaaatacacacatcgtatcatttagttctcagtcaacctgggagacgaccaacagcatccccattttgcacattagaaaaattaagacctagagagtttaagtaactcttaaacgctctagatacaaagcaaagagccagcaggggggattgcattatttctttatacgtgtgggtaaactgattaaaaggctttccccaaatcccataaagtgacccaggttcctggacttctggtcaagtgtttgttccagagtattcaaaagatgatgtgtttttctttaaaatataagacccctcctcctttttttttttttttctcctggtggattatttgttggcttcccaggccatctgttttggaactaatgggactatcagtgccaaacctgtagaaatgacattttgtccatgggaaaagtattcaggacatttaggtgtgttgtccataggaagataggagattcctcttccttggctgccagagacagctgttcatgctttaagataggtcattgtagggtatatgtatatgtgtgtgtgtgtgtgtgtgtctatctgtccgtctgtctgtccatctgtctgtttttgtagtatacgttcctcagtgctcttgatttgctatcttaagacaaaattcaagagtcttactgttacttaaaacgtgtactcccaccacttcttgaaaaaacctatctgtagacagaaatatagagtaagagaagtcccttaaaaaatgaggttttaagaaatttatgtttttgcttttggggaaggcagctgagtggctactgtactggatagtgcagctgtaaggctttagttttctttgtatatttttagttgaaaaggctgactttgtatactgatatttgtattattgttattaacagctaccatttcttgagggttgagagtggcagacctgcttttaactgcagactttagtttgataccacatgtgcgtaattgcaagttaatccaagacacacacactcataccaccactatcatcaggccttggtttatgtgcttggatatgccatttaagaaaaataggaaggcttctgctcttatggagattgcatatcagcaaggaggaacagataattaaagcaatcagtatttcagtgttccgataacggggcattggaggccttcctgtacctgggtccagtgggggctgtgctgaggccagcagatcacaggtcaccagggaggtgcactccttggctttgctgccttcagcttcggtcctcccaccctctcctagtggctctggggaattgcctttctttgggggcctgggatgggttgctgtggaccaggtgacggacggtactgtaaggtgccatagcctgtgtgaccctctgcctggaggcatggttgaaatccctggcatgggcagactgacctttggcctttagggaaagagcctcgttgccagcctggtcctcctcagtgacctggttctgttttggggtcggggtggagtttcctgatgctgatggtgccgggggagacctctcactgaggcatgttggatggctttttacacagtccttcctcaagcagcatctcattttgtctcgacagttaaagtagacatcgccccacctccccacttgatcttgactggccatggatggctgggtcatgaaggctgaggtgcagttggattctggtctatcaggatggttataacaattttttttttttttttacatcttcttgggggcttagtgaatgaaatgtctgtattgggacaaaatgacagtgacatttctaaaagttttgttgtttctcatcaggagaggctggatagcaaacaggtgaaggtagcgcagtcctccaggtggggtggatggtgaacgttaccaccaggtaaccaaagatggttgatagcatcctccagccaaagatgaacagacagacacctctttcttctcaccagagtaattctaacaaatgagaccagcacactcaattagctctgagaatagcacagatcacaactgcctacccagcatgacagataaatggtgcggtgagggatgaatttaggccaggacatctgggtaccagagcctacagggccagctctgctgtttctgagcccagtgctatgttcctctgattttctggaatcacttatggacacaccctccttccagcctgtactggctggtccgttagaccttttccctctcttgggtccgtcctaagcttgcttcagaagacggcttctaagcttatgtagtcatttttttccttagtcacattgtcaggggctgtcattacctgctcaggtcttagtggttctaactgctgcctctgaggtttcttggaaattcagcttgttttccagaatggtggcagtgctagggatgaccaagtgacagggttgggccagggctctccccatgttgaggttggcacagtgtgtgatgtgtttccagccaaagggcaagaggactcatttgggagatattatggtgggcaccacgaggaagagtgctggcagggcggggctcagataagggtgtgctgaggaagcattccagccagctgggctagagcatttggagttaaaccctacgtcggatgctgtgttgtggttaaggtcagcagctcaagagtcactaaagttggatgtagtttgtaaacatcgaggttctataggaaaggcattgagatttgggggtatttgtggaaatagtgtgtcccatgtgttagcgtttccaggctggattcactcccatgaggtcattttcttgttcatttctcttagactggctttgttctcgggtggctctaacactagggcagtctcctacacgggcagcccatcttggcactgtgctctccctcactgacctcctgtgggattccagacaccacagccttcgaggctgacctggcctctttccagaagatgtgcagctcttagcacgtcatacatttcttctgcctaagtgttgactactggcattgtgaaattaacaggtacattcttattttcctatattaattggacaaaacttcttgtaaaaatggagttgctctcactcctttcttggcgaatcaacaaaaaatggaattggggaaggccttggccatgagccgcccacatgtgatccgctggagacaggggagtagaggggtttgtgtttcttctcagtctttgtttctctctgcctgctccccagtccttcattacagtgtagttcttgggaaagttctaagtgtgctctgtgtacttagaggaaccattccaatgttgcatgcttatagttttcttatataaaagaaacattaatgcaaaacatgttttaatgtatctttaatgttgtaagtcttaaaatataaaatcctgaaaaccggctaagtctgtttaaggttttagagcactgctgtctcctcttgtgctctgcgtttaaaggaaacaagaatggctgggctagtgtcaaaacacagaactggtgttgtaaatagatagtccatgctggagagtggatgatgctccagctaagctggatttcccaactggaagagacaattagggattgcatttcacctttcattgtatttgtatctgtttccctgttgctctgttattttctgaacatccttcctctgctcttattgaaagaacaaatggaaacccaaacctgctttgcctctgatccttacaccatggcatcccttcattttatagccatgcgtcccagagtggggcctctgcacctgcttttcatttcctgttcctcctcagcccactccaggaagctgtcttgagaaggattctgtgtgccttaaattgccacattccaagattggcatcttctacctaggagaaggaaatcatactttggctcaccttggcatagatgagaaaagctgcaattcaaataatttgtgttgtaggaagtatttcttttaatgttgcaaattagtgaatttgtagttagagaaaattcattaaaaaacccgtgtgtggctaacatggtgaaaccccatgtctactaaaaataaaaaaaaaaaattagctgggcgtggtggcaggcacctgtagtcccagctactcaggaggctgaggcgggagaatggcgtgaacctgggaggcggagcttgcagtgagccgagatcacaccacggcactccagcctgggcgacagagcaagactccgtctcaaaaacaaaacaacaacaaaaaacaaaaaacccatgtgtgtttgtgtctgcatttatgtgcacacagtgggatataagtgtgtgtgtgtttatatatatcatgtatgcttgcaaattattatctgtttacctgggatacacacatagatgcatggaagtgtgtttgtatgtgaattatttacaataacagcagacacggtgttctcacagtcaagtaattgacccccctccagatgtcagttccacgtgttgcacaacgtgaatgcaaactgcttgaaagggcagacaagcttatagcaaacacgagttgcgtcttggtgggtttcacactgactggcaatgctgtgtcctgtgtagactgcagagagatcctgcttcccatgatgaccgatcagctcaagtaccatctggagagacaggaggacctggaggcctgctgtcagctgctcagccacatcctggaggtgctgtacaggaaggacgtggtgagtgttggctctgtgcgtgacgtcctgccatttgcctgaacctgccatttgccttgcagtacaactttattcagttaaaaatgaaaggtcttgattttaaggtctagcctctctttttgtctcggtagagttgcacccttaaattatttttatttatgtatatatggtgattattacaacatttatccttttgcattgaaaattgttctttatttcctgtgtcttctcgacgaaatgtctctcaggacctaaattttcatccttaaggtcagacaaaaaggctttgatgcttaaagttggctaattatctgcattctttcttcttatttttattaaagtaatacatgcacaaagttaaaaataaataaataaataaagccaggcatgctgagggagtcgtaaggagaagagcagctcttttcctcccctcaggctctcttcccctaggtcagtgctttgcttttgtagctctaccctattccttttttttttttttcttttttcttttgagacagagtcttacactgtcgcccaggctagagtgcagtggcacaatctcagctcatggcaacctctgcctcccgggttcaagtgattctcctgcctcagcttcccaagtagctgggattataggtgcctgccaccatgcccagctaatttttttgtatttttagtacagacggggtttcactatgttggccaggctggtctcaaactcctgacttcgtgatccacctgcctcggcctcccagtgagccactgcacctggcctaccctattccttttgcatttctaaattgtatgcttctttcagggacttttttaaaaatcagaagttggtgccagcccagcgaagtagctcacgcctgtaatcccagcggtttgggaagccaaggcaggaggatcgcttgagcccaggagtttaagaccagcctgggcaacatagtgagagcctgtctctagaaaatgaaagaaaaaataaaaagcaagtttgtgccagcacatatggaaaagtctgaccctgtgcctttcactcccaacataccattcctgttggagcacacacatgatgctattgatcttccaggtgtgcctggaaaggtgaaagcagggctttgtctgtccttgcccctagccctggacagagtggccaggatttctaagtagataaggcttgtccctggccgtttcctgcatgaccttgaaaatccctcctagtcaccacgcccatatacctggccacccactccgctgtagccctggctcattctctcagagcctgattagtgatctggaagaaaaagatcggattaaatctgttcttggtgatgctggaaacctcacctcttacaggggcattgcctttggagaggtcttggaggccttcacccaaaggccagcctccagtggtcccacttcaggctcttccctgtttttattggagaaaagcttggggtaagagcttgtatggccaaagctcacagaggaggtggtgatgctgggaagggcctagagcatgtgtttaagcagattcatagttcacgaagaagaatcaacaatcgcatcccacactaataaaagagttaatttttactgaatgccacagcagtgtgaattttagatagtttgctaaatgctgtttaaacattctatcctgtgtgactgtttaagttatttgcatttgacgtgcagaaccatctaggactgttatctgcctgccttccatttacagatggccaaatatctttagaaaactaattggtgggctaatcagggatcataaacattatattgtttaaacagattttcttttatttttaaggtttgcttaaattaaattactatgattatatatgtaacaaattatcattaatggactataattaataaaaacccctgagtttttttgtgagagcttttgcctttgacaagggccatttttcatctcattaagggttataattgatttactctttacagggtaaatggattcaatgacaaccactggggcttgcatgttaatgtttctctggtgttggtgttcattggtgtgtccttccccaggggccaacccagaggcacgtccagattatcatggagaaacttctccggaccgtgaaccgaaccgtcatttccatgggacgagattctgaactcattgtaagtgcttggtgacatatgtttggatatttaactggggctgacagcatccttctccaactgctgtttgaacatagcttattatactgcaatgtagtgagcagttgagatacagcttggtatataaaatgtcctcattttccaaatgaatgtcaaagttgaagggtaagcaaaccaactttaaagatggaaacatttggctcttgttttctcattacttacttatagcaaaagacatgtattttctgctgagtcgtcattcttctggcagtttctccatagtgtttacacttaaggtgccattaataaaattttatgaaggaccctaaaaagtaattgagattcttcaccttagttattttattgtctactctaatgtattgtaggtgtttttcttaaacagtaattaggcaggagcctattcatttttttcaagaatattttactaatttagacagtccatcaagtttctgatcatggtgccttttcccagggttcactgctgtcctctgcacccccttaccttaagtctgtttccttcagcaaaaaatgcatgagtagatctcgtttaattttttttttttttgaggttcaaggggttataatttctttcctttttttttttttctttaatttctgggatacatgtgcagaacatacaggtttgttacgtaggtatgcgtgtgccatggtggtctgctgcacctatcaacccatcatctaggttttaagccctgcatgcattcggtatttgtcctaatgctctccctccatttgccccccactccccagcaggccccggtgtgtgtggttctcctccctgtgtgcatgtattctcattgttcacctcccacttatgagtgagaacatgtggtgtttggtgttctggtcctgtgttagtttgctgagaatgatggcttccagcttcatccatgtccctgcaaaggacatgaactcattcttttttatggctgcatactattccatggtgtataggtgccacattttctttattcagacacatgtacacgtatgtttattgcagcactgtttacaatagcaaagacttggaaccaacctgaatgcccatcaaagatagactggataatgtttaaaatatttagcacatgttatcatttaagtcatcttggtggatcctttccaaaaaatgacttgaaaggagaaaacgtccttttggagttttcccttgacatcagagaaggcaccctggtccttcctggtgcgtgaccgttgttcttgttgcatatctggggtgtgaacagggaggtgatgtgcgtcttcttggacagcatagtcagaacggagcactggggtcctttgcgtttttatgtctggtgtcaccacagaggactccgtgtcgtgtgcgtcacagacaggtcgcacagatggacaaatgctgccttagtgtgtttccatccagtgaaacagttcatgtcttagagcttcagcacatgtgaggttcagattttcctttttaaagtgtttaaacttaaagtttaaacttaaactcacattttcctttttaaagtgtttaaacttaaagtttaaacttaaacacttttaagtttggattacaacatgtatgaatcaggaaataaaatgtttccatgtaaattggctttatttacagtagacttttccattattacataaacataaatttgcctgccttttcttattctccatgataattattcatagtcttgaaacacatttggaacacattaatatggaatgggcactgagcccatggagaaggatttgcagtgactccacgagccacctgttgacccctgaggtctggcgttgacccctgatgtccagcgttgacccctgacgtctgacgttcctgtcttcttggagtcgtgccgcaggtgcactctgcacagtctcaggagtggaactggaaagggccttatgtagagcaaagagcatgtggcttgaacttgaaccaagtgtggttctgccaagaccctcttgggatgggcggacttagagaggctggggatgacatgatggcatgcaggggtggtggcagatgagggagagggtagaagtggaggcaggtggtctcatgagactgttttgtctctgtttaggggagcatggttctgcctgtgcttagggaaacatggttctgtctctggttagtgggtcttggtcctctctctccgattaggaggtcctgtctctggtcaggggggcacagtccagtctctggttagggggtgtggtcctgtctctagttggggcacaatcctgcctccagttagggtcttctttttttttttttttttttttttttttttttcccctgagatagagtcttgctctgtcgcccaggctggagtgcagtggtgcaatcttgactcactgcaacctctgtctcctgggttcaagtgattcttgtgcctcggactcccgagaagctgggattacaggtgcacatcaccacactcaagataatttttgtattttttagtacagttggggtttcaccatgttggctaggctggtctcaaattcctgacctcaggtgatccatccgcttcggcctcccaaagtgctgggattacaggcatgagccaccatgcccagccttatttagggtctttatgctaggtgtgtgttcacttgacttgtagcccactggtcaacagttaaactggagggaagagggcacagaaaaagctcataaagtttggatgggaagctgggaatgtggagagattataagatgtgctcacagcttcatcaaagggtagaatagaccctgcagggaatgatatctcctctcagaccatgtggtccaggatgtctttgagaaatttctcctatctcaggcatgataataagtgtggtagtaataatggcacctcttcactgagcatgcatttacgtgctatgcactctataatgaacaggaagattctcatttaattctcacagtgccctgcagacagacaagaaacagttcaagatcccacagctagcatggcagcacttgtttccagcctggatttggttcccatgtatgctgtcagtcccttctataagacacaggcacacgatgctgatggccgtggtccacttcagaagtcatcgaaaggactgagctgctcctagatccctgtcctgcttagggagacagctgttcagggaaataagcacctttctattttctatcatgtcgtatccatggtccaactctaggatctccttgctagaagggccagaccacaagctaggtgcccatttcctgaagggcttgggatgctccagcttggaagaacccctgtgttctaaggaaccctgaggagttcctcaggaagaagccttgcatgttctaagaagggggtgtgacagcgaggacccatgcttggtcttatccagagccacattgatatcaagcatttggcataggggtctaagcactgtccgggaatggaagaggtagaacaaacttcccacctccagaaccatcctccacagccctgatcttcccaaacagaagcctcaaagtgggaagaggagagaggtcttaaacggactcctcccaattccaccatctctaagatctgtaaagaagtaaaaaaaatccttggagtttcttttataaaatgcagctgtcttgaaaggactctcaaaaaaattctgaataagctataatcatttaatgagtgatgacaacatcaagatgttttcaagaagggtgtttgccactgaaaattcgagttgtttagtgggaccttgtaatccccaaccagccacgagccccctctctggagtcaacagagcagtgtgagtgaaatgctaccctgtttaggatgcctgcccttgctcttccaatttgcatcaaatgtagatttgtgcattaactttttaaagtcgttgctctgtgaatttagattagaggaagatcaaggcaaaaagtatccctgacaaggtggacaaaaaccttaatcagtagaccttctagagtggaaaaagagtagaaaatagttcataggtctgttttgggtaggctgttccattccattatatcttagagatttcagcctttatgtgttactcatttttgctaaatatagtggaaattatgtaactatgaatcagcttaaaaattctaagtaatcactgaaaatgagtttttaaaaattaaagtgattaaaaagaactctgaaattaatatactttacttaatgatttattccatgatgttgtcaacaacagtactagaaatgtggcctctttccatcggaataaggcattaactgggaatgtgattatgccctgacagcttccccctattaatgtaaggaatagaaaactggggaacttcacacttaattagataaattgggatatgcaatataaggcttttctttatctgtgggattttacaaaaactcgactttgcagtcagttgtatattgtttgctttagttgattatatttgaaatgggtgattggaatgcgtctcgtgcctaggataataatgtgctatgatccgaagtattacatccttaagaaaaaaccaaaacaactctatttggcagttgcagaattgtagaccatgtgaatacctagcacatgcccagagacagaagcgttgcaataaccttgccacagaacaaaaaggtcattttatctttactctgatgtagtctgatgctgtagaagcatggagtgaaatacttatttttatattaagtcagacttcaggatttatttcagccttcctttttgagaagctttctaagccctcagcattaagcagcatttttcctcatcacacacggatctgagcaggtgaccgcggctgggataggtgctgttgtgttgtgtgcaggtgggctggccagccattgggtgtgtgtttttcctagagtaagaagcactccaggctgagatgagagctgttgaaatgagtaacatttccgtctcctgtgatacgcgctgctgttgcttctttcaaatgatcagatttacattcttttaatgggtcctttaaaaatgtaatcgagtgagaaggacttctaaacatttttctttggcctggatacacacgaggggattggaaattactaattcatgaaaatgaaaatgtgggcttcttttaaggaaaaattccctttgaacattgacagaagtgggcatagggaaggggaagattttgcctggattctccacttaactcttgtcaccactggagcatcctgactccctagacacaagtgatggaagttattttgtttccactctaaacactgtctcagggggacattgatgggatggtggagggtgtgtttcattgtgacaacagcatctttggtggggaatttgctgttggtgaaaacccagtgctttctctgagcatgggtgattgataagggcctgacatgctccttcatttggaaaatggtattaatagaattggtttcccagtgaatagtgccttttacccaagactcataaccaaatattttcacaaagatgttatatccccatgcatgagcattcattttgagatgttcattataatagagtttaagtatgaatgtgttttaaaaatgattttaaaatcatctgcaaaaaaatgttgtgtttcaaatggacagtgtctgggttttgtatagtcatcataaaaatgtctataattgtactgtttgctaataaacctgcctgctttcagaaaatcatcctaacgtgtgtgtgtgcaccaatggttttataagttcatttttctttggggcagctacagcaattttaggtttgttttcatattcctgtgaccctggtattttttcaaggttggttactagctatgggtttactgcagaagaagtaaaaaccacattgttgaatgggcacaatatgctctgcaatccttacatattcataccaaacagcaaagatatttgcaaaaccagactgccttaagttaatttttgcgcaacttaaaatgaccttgtcattgaccaaaatgtataggatccactgtagcatgatgactttatgccagttcatgaaatggatgttctttctgatctttgtaccacagagttgtttactttcagtaaataaagtggctgcacatgcagtgcctgcaaatatgctagtgatagagtttctgtaggtcaaagaagacgtgctggtgtgggaagcagctgctgtgatctttaggtgacactgctgcagccaaactgccctgattcataatgaaatcaactttcacttgctgataaaaatgctaaggaatgagtccaccagtgacaggttttctaaacaggccatggtgttactaacaccatgacatagaaaagttcatgcctctttcttgtttccttttcttgctgtcttctaggaaaggccagtatttgatggtctgtcttcacagttttaattaagagttgtgtatcttggttctgatatgcccatgtggtttccaaggaaaacagtgttgcaggccatcctccttgtgactgtttataggttggagttggtctgcctgaggctgggccatgactgtgacaccatttacacccagtagtccagccacatctcagatctctgtggctgtagataactaactgcctctcagggtacatgggaaatgctgccaactgcctaagttgtttccaaggtagcaaggttttcccatactttgagcccctccccatttatcttctgctggagggtcagagattgaaggagcagatgcaggactacaggacttctgcttcttggaagtgagttgcacacttgtagagtgactggtgggcacccttcattgtatctgggtgtctgtagaacaggacctttgaggcagcaccaatagttggctcagaaatgattatagaatgagacagaaccctccctctgtctgctctgggctgtgcattgggccttccttccctttctgcatgtgtcagaagaggaatccccttcttctccctgaagaacatgcgatggtagcaggagccttgagtgtcggtctgcagtgccctctcccttgcacatggactctgtggttgcagatactgggaaaaagcattgtggcctctcctctcctaggccgtccaggtgaggcaaacaccagcccacgtgtgcagatgggttagtattaggctagtgtcagcaggagaggtaggcgctcagcctatctcccactagggaggggaagaagaaaggaaggaggcggctgatcccttgaggctggggatgtgctcaatggaagatctagagagaagctacctcccctgggccatggaggcaagatttacatgccacagtgtactgtggcaacactcaatgtatttagccatttcttctgaggttaagaattaaacctcatatacctcctgctatgagcctgtgtgcatcctaaaatgccaccatgtgttccggtggtgaaactccatgccagggtgcataggtgggcaagcgtcagtcccttccctccccaagccaggccagctctggctggtgggtcaggcccaggccttacgatgctcttgtcttctgcagaccggatgaaatgcctatcggcccaaacattcttcctttattattattttcttagattacttttatgttccccaatttttgaggccatgaaataagtttaatagccacataaaacatctttgatttttttatttaaaaattaataaagaacttaacgacaagtataataatttaatctctatatgcaatgccatgtgtacatctacataagggaaccctgtgcgttttaccttgcttttgtatcagcgtttttacttgaatctttccaagagaagaatcaccatctgttagtgacgtgttgcaattaaactatgaaatgattttgacaatagtttttctattttgaacacactttaatttttagggatgaattaatttatcttcagaagttcctttttgactctgaacattttaattttatttttttttggtctagactggtgtgaaacagtgacattattttgtgtactaggatgtcctcttgtttagacagatttgtgttactaattagaaaactgctaatacccttatttcaatttactgagatagttgggattcttaaaacataaggagagagaacttgttggaaacatttttataactttagttaaaaacagtataaaaaacatgaaacccatttttaaatatttagtctacgtgaaacagttacacttccttcatgttacaggatcaacttcctcattgttcttgcaccaaaatatttctcagttccttttattgatattcagggattcgaacttcatatagtgtttccgcagaggatgtgtgtgtgcacatgtgtgttttaaattaaagcatacaactgcagtgttgtttggcccccgaagaatgtttacacgacatactcttcatttttttttcaaggcccgatctggttactgatcactaggtccttgtagaatcaaaacacttagaactaaaacagatttgctgttgagtcaggaggaaaatacatggcaagaagcagctccaatctgacaaaagcaggtgagatccttttaccaaggttagccactgtgtgtttggcatctagtcaatgaggtgtgcatgtcagcactccactagatgtgaaactgctggacagaaacttcaagactaggttttcctgtatgctcacaaactattcaaaatttaagttgtacaaaaaaaaaaaaaaaggcaaagtaagatccctacttcctattgtgaaaatcaaaaaattgatagacaaagtcattaatagactaggggatttgatttctataaaaagatacttgcaaaggtgcaaagaaatgagtgaaaaaataaaggaactaagatttacattgcaatgtgtaatcaagagagaactctaagtgttactgttgatttaaaaaatacctaaaaacatttgattcacagctttcccctaagtatgttgtttagtacaacttactaataggttaaatgtaggcgacattgtcccttggtagcagctaaactaaacgcactgtttctctttgagatggtcagggcttccaccattaatacaaagcataacgaattgtacataacgtctggctgcacttaccatggctaacagtgtctcggaggatcgatccacaaaaacactgtctgccatggcacagaatgcctgtgatttattggtgggtggattatccatcgtgtatctctatgtatgttctcagattcttgccagaatgtattatttggcctttgggtaccaaaagattaaaaatgagatctaagaaaacttagtgtccaatagctctgaccctgtctacttgcagtgattaaaggcatatcctgactttgggggactcctggctgctggccatttggaaaatgagcagtaaacatgtcgtaagtctggagatgaagaggatgctaaatttgaggtgtcgttgtgacactgagatgtggtcacttggcttagcgctatagcacatgaaggcaaatatacatatagtcacattttagagattattcatggtctccgaccacttgaaaaaattgtgctttctccggaatttgatgtgctgaaaattgcactcgccccctgcttatttgcaaaatgaaacataaaaatgaagtccttcgcaaacataaggcttgctttttcttctcattatttaaaaaaaaaatcaaggcttgaaaataattatgagttatagctgtgtacagggtgacagcctgccatctcgcaggttgataatgtattacttgcagatcgggggtgggggaaaatttttacttatcatctttgactacgtaagtttcatttcagattttacatcccacatcagtgaactgcaaagaacagctggcaaggagtgacacagaataccttgcttctgttaattatctattggtacaaaggcctttttggtacgcagggcgagaagtgggaggtgcctgaatgggcaccacagttccctcgatcctattcattttggaaaagtattgacttaaactccagtgggttctaaagacggcctcgagactccagacaccgtgagtgttaaaggaaccagagtttccatcttccgtgctttttagattcagttttggatttttgcttgggagttgaggagtaagtctcctgagagtaaggcgaaggtatgacctgagtttcctcaatagggtggagttttcttagaaccggctggagtttgtcttcttgctgcttaaaatccagctccacactagaaaagagagagagtgaagactttagcatttgatcttttccatatgaagatccctcttagtgtcagcaagatttgggcatgatcagtgtgtgtttgtaatgtaattttatggtttaataatagcaattcgatatactatgttttagctctgtgctcccgtgaaatagttcaaggaggctcacttcctttggaaaataacttacttgcttctgtaggtgaatctttaatattgtgttaatgtgcacagttggtgtatgtatttgtggaaatgaaaaatgtgaaatatgaataaccccattgtttgtccacagtctgttcacatgggcctcatggagtaaaacagaaaaccaaaagtatgagtgggcaggggtcaccttagtacatctataccaagtgcacgcaaggtccgttcctgtgcaatgtatcacaagatcagagaaatctatttctctgatctcccacctaaaacaattctggaaggaaatgaccttggctgacattctccttgtaaaagcttatctgtctgaaaatctgataagggccatagtgcccaacgctggggaaaatagtgtgttcatggagtcaacaccattgaacggtactccgccattactaaccacagtttctttgggagaagcgtggggagtgttcagtaaagacaacacagaagtaaaattccatcactcaagccatggcgtgcaagcacagagccaatgtggaagcacatttgccaagcagtgataatgtttgcattagaagatggtgttaaagatgatttttgaactatgttatttcttacagcatttctccgaaaattgctgtcaacttgtctagagccctctcgtctccatgtctttgaaaaggaccacatttgatcttctaacttggagtcctaacaggtctgcttggcagctgggataggacccccggtccatgcatcgtttttctgtgatgatctctgcattgaggagttctgcttcccttcccactcaccctgtccctccttgggacctctgcgttctgggccaggccttgggaggattccgctctgtcctccttccatgtctggtctggatgccagactaaatgtcagtagatttcagtaaaggctcagcgttgatgataatgcatgagctcataacattttataaccagtggaaccgtaaaccatttataaacatgaaatcctattgatttagagaaccattaatcctagacaaattttgacattttggaaagacagaaacagccaagctatattatctggagttttaaaacaagttcaggacccatctaatgggccatttcatgttttaaatccactgttccatttttctcattgtcagtgactctaatattactcaaaaaattaaaaaaaaaaattgccagagaagtttatggctagtgacctcctgctcccaaaacaagttatccttttcccttttttcgaagagcctctttgagttatgctctaatttataggaagtagaataaaatctcatgaatttaagtcttgctaatccagactacgtgatgatggaggcatagtctcttctaaggacagttgtgaaaagtgcagtctaaggctgtgctgcattaatgaaatccgggcctcagttccgtgatgtggtgcactagaaggacatggggtttccaccctgcctcttccacctgatgctggtttgggagtcgggggctccttaaacttcaattctttcacttcaagggggagaaaatagttccttcccaggctgtcgtaattactgaattgtggtgacaatctctccccactgaaaaatgcccatgaacgagcctcctaaactgtaagatgcaatttaaatattattgtaccattattatctattgatcactaatcttataatggaaacaagagctaagtaataaagatatctattagggatctcttcaacttggacatttaacaaggaaaacaagagcctgtcaatcgagtctgtgaatatacggtatgttaggtatagaagcgtaattctaccaaggtgctttggtaatattgaaggtgtgttctccagatcgtaaccgtttcaacagccccagattggttttgggttattagaacagagagaaggcgctagcatctcctaggctaacagtacaatttcggctacctgtaattattgaattcccattaagcaactacactgggaatcctgttattaaccaatttatcacaccaaggaaccatgtaatcacagagtaatctaatctgagttcttgttaacaaaatgactcgactttatctgtcgagttgattcctgtttgcactccccattatgctgccctgggaatctgcaaccagaggcaggttccttggtagagggcacttatgagtctgtgagtgcccacttggaaacgcctgccagcaagttgaccctgaggtccgccccccagcccatctccccatctgtcacatgtgagttgcagtggatctgcgtgtgggatgacgcccgtgcaccagccaggcaacgtgtgcagaggtgtgaaggaataatgtgcattgttctggacactgcttcctgctcaaggacttttcttggggaagcacaccaagtctctcggttgagtttgacacaccaagtctctgggttgagtttgacacaccgagtctctgggttgagtctgaagcagaaacctgactggaggaggcagcatcagaaggttaacggtctggccaactctggctgacatcgaacaaaggtccctttagtcttaatagctaaatggatcaaaaggcagcaacacctgctcttctggttagagtagtggacttggagaaaagctgccggtagatgttccagggcactgggactgccctgcacacagacctccctctgtatttgagacagcggcttgttcagatagtgcctgggggcctgcctggtggagggcccatggctcttgcttcagcttccccttcctgctgcccggcagacctgtggtgggagtgttggttgccctacctggggccacatctttgtccggtgctgccagcttcatgattatcactttctccccacctgaaacgcctttctgggctcatggcatggctggcattccttggcccactgtttctcaggtccacataacctccttgttgtctgaccaccttcccaaatgttgcccaatccatcctgtcttatttgtttttgcactaaccacagataattattcgttcccatattacttgccttcatcttcctaaatgcatcttctcgaatgcaggcaccataatcagagatgccatgcggtcatcctctttctgtttccagcaactatagcaggggctgggtcctagcagttgcctacgtaatattgctagaattaatgaatgagaacagagtcttaaaaggcaaattctggccaggcacggtggctcatgcctgtaatcctagcactttgggaggccgaggtgggcggatcacttgagatcaggagttcaagaccagtctggccaacatggtgaaaccccatctgtactaaaaatataaagtttagctgggtgtgatggtgcatgtctgtaatcccagctactcgggaggtggaggttgcagtgagttgagatcgtgccactgcactccaccctgggtgacagagtgagactttgtctttaaaacaaaaaaaaaaaaaaagcaaattctacctcacttttagtcccagttgccctggactgctttgttttggccaaaaattatgttgtgtcctcccctgtgtcctcccacaatgagaccccttccttgccacagacaaatagggctctgcctggaggcattgtcagaaccactccagatggagtctgtggcctggttctattctatcagaacttatcgaagatcctgaaacattttctgcaagacatactccaggatctttttggagcctggctcccatgccacggtcccctcctttccgtcttctaggattctacagtaagatcttggatagaatgggtggggccagcagggtctgcttgtgagtgaccagctaccacagtcgctgtgctaaggggagcgtgagagttactttgtccccttttcacttgcctgtggacagcaggtggaggtctagctggatgttttctgggtgatgtttgttctgagcaccatcacggtcccaggccaccagacgtgctgtgtgcacctgctttcccagggcggctccagtgcaggggctcattctacagccacacgggcacgtgggaagccggggctccaaaccttgttgtggtttctgaggactctggctgtggctttgcacagtccccttgcaacctcccaggcctcactctccagcagctcaggaggcaggaggctgcaggtggtgctgctgccctcctgctggagggatctggtgtttgtaaagcatgggcaggggagtgtccatgtcatgaggaattcttactcctggggaggagcagcagcctggaaaaagtcctgattcttgagattcaaagcatgagtctgaagcagctggagccaggccagccttacctgtgcggggtgttctgtcctataaacacctgagtcaaacacaggctgtagattttgctgggtgagaagggaagatccctggatggctggggatattgacaagacacgaattcctggggactgtagggatttacctttgtagccctctcgctgcctgcacctccattctccctccagataagggaaccatccacccaaacactctgtgccctggggctgtgtcgccctcgctgtgctcttggcaagtccctgtgatgcatgattaaagcaactgagagtagatttaatttcttggttggtctttcccttttcaaaatgaaagttttaagtgtggggactttcttacaacatgattattctgtacatttccaaagaaagaagaatctgccctacatctcaggctgctctccagcctgcacctaagctttattttcttcccagagactgtgctaggctttgtagtaacacttctccccgctgccgcatgtgattttgcagagcggcatccttcttgcttctccagcttattctctgtttgtctcatgctcctataaatactcaggccctgccacagtttctttagcaagctgtcactgaatcctcaagataatttaagaggaacacatttttaaagttgccttctgcagtcgtccatgtgtaacagttaagagttaaaagcaggacaatctggtgccccggagcttgctttctggaagggaagaaaaccctttgtctttggggtctctagcctcgacagggccatgtggctcggtggccagcaggtcagaggcctctgcctttaattctctttgaattagatctcagagtcttccccagtgctaaccgtggctctgtgctgactcaggctctaccactgtggataaatcacctcaccttggggacctgagcttgcttggctgtgaagtgatggctgagatgtgctcccacttctcacagcagtctcctggaacaaggcctgggcccaggagggcaggtgcaccaggatgtgggctggcttttattgtgtagctttgggtaggaccagccatgtccccaaagcacaacaatttatgtcaactgacattggcgccaacttggccggttttatgtgagtgccatgggcaacaccagcattgtccagaggaaactaaaagttgggatctggatcccaggcctggctctcccccttgcatgggaggtgaattcaggcaagtcctttctgggccttggtttatggatgtgaccctggccacctcgccaggcaatagaagaaccaggaccccaaatatttgttgttctcttctgaacacatctccgtgtgcatatctgaggggcactggaaatccagcatgtccagaaccagatctttcccccagcctgcatctctgtccttccagactcagcctgcagcccccattcatctccctggatgactgcagaccctggaatcaagctcaacttgctcctcctgcctcagcatccctgggtcgagtggatttaccctcagaacacccggtgtccttcctctccgcccaccttccactgctctagtccagaactccagcagtttcctccttggccattgaaacagcttagtctccctcactctctgtattctctccctctccagttaccagagtcaccttaggaaaactggcaaactccttctcaaatccctgcttatccttcaaaacctaggtcacacgtcactccttctttctgtggattttctagaataacaaagtccaccctcccccctgcctcatccacacacctctgggatgagttactgctctggcagcattgtctctaggtttccatgagagcctgtctcctgtgggatcgtagctgtcttcccccaggtctgtgaactcattgaaggatggaccatgtttaattcatcttttgtctgcagtgcatttagcacagtgctggctctgaacctgctctatttgtttgttgaattacaataaactgatgaactgaaccaaatcccctcacttctaatctcagcaaagtgctgccgccctattttctgttttcatttaaaatttatacatttgtataattctatttattctgtctatagaatttgttatatactatttctatattatatacctacattaaatatatatggatctcatcctaatagtttaaaatatcagtggtttgtagttaactggcttttcaacactttaaatatagaaatgattcaccgtaactttgtatccttcctttaccactattttacatggtaggtgcattaatcaatgtttatggtatcactgtagggcttcaaataccagaataaatggctaatccatgatagtaacactcaaactgtaagatctgtccccttttcctggtatactatgaacaagaaattatgattatagtttttttaaaaaagcattagccagatatcctagctgtatattttactatgaaggatccaaagttagagttagacgatgagctgagctttccaaatgcatcttggatgttttccgtgaccatactggagaacttgcttgactgaagctcatcctaggtgcccatcttacctgtggcactctctggagtgcacctgcggctctgggtcctgagcctcatctaggtgcctgggtctgagggcaggtcagatgcacaggggtcagagaacctggcatcccataaaatagtgccaccgaggagcagaggcagacccaagtcatttggattgcctctgcccatcgtaagttctccatgaggaaagacaccccatgactaacagcaccgccacatgtctatgaagcatatcttatgccatccccctaggaagccaggaagacgagtcatgataatcagaggagtcagtcctttctgagacgtagcctgcagaacactgctgttcctgacctcagtgaagaacagccagttttccaacttttgacagaaactgtgttataactgccttgaaaaggagatgacacagggctgttgtcctcctgttctaagctggttgctgtgagtccctcgtggccaacccaaccctgagtgggatcccatgacccagggccatcaccttgcctgcctgtctccttttgaagatgggagtgcgtctgtctagagacatgggtgacgtcccgggctcccagtgttggtgtgaaggctacaaagccaccctgcctccctgggccaccagcccggaaccctggtttctagatgtggtcaggagctcccactccatcctgatacccattgagagcatcatctccactaaacgtagcagtgatagttctcatcacacacggaaaccattagctgcttgtgtgtgtcatctggtgtcaccagtgaccggtctaaacgtcagcctgtgcattcctgcaggaggtcccttctcaaacaggttctttcaagacgcctatctgtgaggaagaacctgccctggggaccccgcaccctgaattccctagtcactctattccccatggaatttcatacgacccagccctagacatcgtggccaggactgcgtcccgtatttacccccagaaaaatctccatactcatctaaacatgaattatctttatcttcccatgaaactgacagcgtagtcccctcatgctgttttggacattggtaaatgcctccttaactttgaccttggggtataaccaaaggctgggactatcagtataattagcctttctctgctaataaattttaactaattgtttcacaaataatatgttgagatgggtaatcagttttagttacagttaatggctgtaacaagtttcctagcatctaaataagagaattaaggcattgctaaacattagtaaaaatgactaaacctaaatccgtacatattcgagggacataaataatatatttttggatttcaaatagaaaagaaaaaacttggattattagctttgggaattttcaagaagaatttagagatctgtcagaatcattcttttttcctgacttcattaaacaaaagtatttccttaccccagaataacattgtgtatgtaaggtgttatccagggattcctttctctcatcttcctaccctgtcactcaccataaatactaagaacagagcactaaacattaggcaaaaggcgaatttcccccacctcagttcatgctgctaaagaacttaatatgcacaagtggtggtcattgaagcagggctggaaagggcacttccatgaagagataatcgctgaatgacaaaggctgcagagactccactccaagtgggctccggacaggctggaattggcacggattctgcatacaaatgcaattaccactcttaacaataggtctccattagtcaggaggtgcccggttctgccggctgtcttgatcgtgcactatcctgaccagctttctttttgcaatacactcggaatcagtgaagtgccagtgtgcgtgattttatctagaactctttgcaccctctgttttgtggtcttattggtgttgtaatacattaccaagaatgatgtgagaaaatacaacccatcacttttgtgaattcttcattcagtctcataatgttagatattttcctcatctttcctgaaatcctccagtcatttggggaaggaacttgccttcttttggagcttcctacttgagaagccgtcaaggattgtggtggactgggatgttctccagcctgtctaagggggagtgttcacgggtcgcgaggtttcccatccatccttgggggtgccctggctgtttgtcctcctagttcctgccagttgttcctaacgccgtagcctggagggctctagagaggccatccaaatcctccctaacctggcctccctccacgattatcttgttttctttggagtctgctttgccaggtcgggcaccctggcttccttcacctcctcctcgcctgccttttacgtccttgcacctgtggctctcaccttccatacagagggctctctctcgccagagctctgtccttaccctcatcccggggtcccagggtaaggggcatgcatggaggtgtcttcagcagcttcacactcctcccagtctcccagggcctggtgcagaacttgtccttaggaggtcccttgaaaaacacctgttcaattaataccctttaggaccccaaatggaaagggctaaggcatttttatcaaagtggttgtttaaaattccacctgtccttgtctgggcacggtggctcatgcctgtaatcctagcactttgggaagtcgaggcgggtggatcatgaggtcaggagtttgagaacagcctggccaatatggtgaaaccccatctctactaaaaatacaaaaattagccaggattggcggtgcgcgcacgtagtcccagctactcgggaggctgaggcagaagaattgcttcaacccaggaggaggagggtgcagtgagccgagattgcaccactgcactccagcctgggcaacagagtgagactctgtctcaaaaaaaaaaaaaaaaaaaaaaaaaaaaattccacctgtccttgaccatcatggatcatatcaaacagtgaaagcatggagtacacagcaatgcgtttcacaagctccccctctctgatgtcagacaagtggtgtggagccttgtggcgttcccatccagtcaggttccaagcccactcattgatccactgcagaattattagtgtcacttgaggccactttgtgtggtggctgtgatgatccagaaatgaagcagacacagcgtgctccgggaggatgtggtcactcagggcttgcaactgatggtaggaattctaccacttgacgagaagattctaaattctgggagagatgctgtttaatgaatctgagtcagaattcctgttatgttttaaatcttgctttcatctccaaaagcccttggattgcagttggtccatgttattttcatgaaaatgtacacattagaattcaggccattttgtcgcagtactatgttacaaattaaccatttcagcgaaggagagaatggctggtttgccgatgatgtttcattgttcctttctgaaaccacatccgaacaaaagctgaatcatccgtggtgtgactcatcagattagtccgacaaaagaattaccaaaatagggctggagagaagaaatttcagctgcttatgagcaaagattatattagtaatttatccacaaaacattttctgaaataattacggcatattttgacaagaaatatggaagataagccagaaaagttttcctaaagaaaacggaaactggaatctcttttaatcttctttcatgctgagatggttttaattagagtagcacagtcggtctgcatcacaaccgaagggatgtctgtcatcttagaaaaagatgtagctgtgtcaaccatctcaaaatttgtcagaaagatcacgtttggtacttggggtttcagtggtctaggaggaagcccatcaatcctctgccgaagaagtgttactcagctctgagtcaatagatttgccaataagggagaggtgtttttcagctgaggaatgccttgtgactctccacacttttacccttctgtgcagtctcttgaaacccatagttacatcccttgcataattgtaaaaagcagctcctgggatttcagatctggaagggaccttgatgatcccttagtgcaaccccagaggacctggagactgaacagacaccccacccaagagagagggcagagaagctcagccctaaccttgcaggtacgcggcaggctctcacgggctgatgtttctcacctttcgcttgtcgtactggtggttttccccccgccttgaaattgcatcaagaccgtttgtccttttgatgcttttccctagtcctctatatttccatgacagaattatttttcacagagaaatatgtaccgcctcccatggcaaaggtacccatttattacaggcctgtggtgctaaagccccaggcagccgggtcttgaacacagtatccttttcatctccctgggccaggcattactggaaacacggtggatagctatgctgctcggagagggtaattgggtttcgagtgaaaagtggtgtttaaatgcaagacaggcagggtcaaattcatttccctccagggcttttggccttccagaaagcagggtatgacattacaatgtgtgaacactggcagctgtgatggccccacgtgttctcaagcctctgggacaaccacagtcatgtgacattttaagatttattttgaaattcctttaagctacccaatcccggggtgttccaggcatcccatggtgcatatggagaagtgggttgtaatggtggtgtagggactcacaggaaagttcctgaactcccggattcaggtccttgcaactaagagccaggctttgatctgacagcaaggactgtaacctgagctatactttcccctgctgctggaattgtgtttctacagattcatatgcaggaattcaaggaggacttggctgtaagtttgcatgggagaacaagacatggatgtagatttgtaaagcctttgaaatttggagacaccctctggctcacttggagtctatacttccgagatgctgtggccacccatgtacactgctactgagtcacctgaataggtgactcctcctgcccaaggaactcactgggttctgaacacttttctaccgaagaaacttctattcttaagcttctgacatttgggggtgactcacagaactgaccgcaagctgcgaggtcatccagctcaatccccattgctcaccctcccctttctctttgctcagtgggaccctgagggaagtgaccctgtgtatcagcaactctcagccaccagggcagaatcacacagaccagtgcttggtagtcagataggattacataagccctcttagctgatgtgctagattaaccatatggccctgtcctttcacgacataagtggtgcacccatgatgctgggacccttaactaactggcttctctgtctttgtcctgtgactctctgtccttacttctcaaggttcatgcttaccaagaggatgctagatttgttcctggacctgtttatacaattagtactcactattgaaatgatgtgattattgaatgtcatgcaaaccactgaggcatgagaagatagtcattgctgtggattcagtgctttggaaagagtggggtaccacaaaatattcaatgaaaaaggtagagacaggtcaagtatggattcagaaggattctgatctcagattctgccacaggactttgctccactttaaagacaggaaaattggtgtggctcatggcagatcatttgaaactgtagtgggggtgccacattcaaagaaaacgtctgggcctcacctctaaaggctgccctaacttgaaatcattcaaatgggagatttcaattcatgcgattcaaattaaaataacatgtttaagttaggtacgtgtcaattttttatgatttccccattgattgatttttcaattaatggaccagaagtgaactttcactccctttatcatctcttcctgcagacctcagaaaactcttatccaacataataaccaccttaagagtaatcgttaaactttaattatttccattataacatgatagggagtttaggaagcagcatttgatgagctatgttccacttggtagtcacagtgcagtctttatttgaatactagttcatttcttgagtttcacactagtttatttcattgacaggactcaatgaaataaagactttgggaggcagcaggagtccagccgaaatattactctgcagactgtcctgggaccaaaagccttccagtgtaacttctgtttgtagcagaagtttggctgttgtagggatgttttgtcattgtgaccactccaaagggagtgattttaaaaatcaggaaagaaagatctaaaactccactcttcctcaaacactacctcttctagaatgcctctcccatttataagggggtgacagtcgggtctgcaggctaccgagggccacatctctattcagtttctgaagatgccacccaaatcacccgtctgtaaaatcacatctgcagtaaaagttctcgatgagtagtcatgcattttccctgctcgtatgagataaccagagcgatcacagtgcctcgccctctacctagtgagtcttcctaagtcttggcaaattcctgtggtgcttggtcactcgcagttcttctagcaagtggaccagtggctgatgtattcggattcatgtagagtgatgtttgagccagttcaaaacagtgaccactcgagtcattcctgaaaggacagatttctgtccttcagagacttattcagtcacttttaatgtcactttttataggagtgaattctggatttagagctaagttcatttaaattatttcagttaggttaaacagtgttcacatatatatatatattttttttcgatcacccacagaatattacgtaggtttaggctgaacagctcattctctgaacctaccctggatgtcttgactcactgttgcttggttgcgttaaagacggtatgagctttagcttccaaactaacagaagctgaactctgagtacgtgccaggtcatctacactctgcacttcctaacgtactgatgttcacggagggtcattttatgtcagtgttacagccctttgttgttgattcaaaattctcttttgcaagatgagtggagtgaaaagtttcccattaagcaaacttctctgatctgttgctatcattgagtttctaatttggaggaattgttgaagaaaagacctgcatggatgcctcattttaacctcctcactggcaattgccaagaacagtcagcagcttggcgtgccatgccaggctgctgcaggggcccctcctcccttcctgctgccaggaggccttaccagcttgtgtgtgcctcttacaacactctaaggtgggggtggtttcagtaaggtaggctttctcaacctcagcactattgacatttgggactggatagctcttggttgtgggggttgccctgtgcaggcagcataggatgtcagcagcattcctggcctctacctgctgcataaccggcagcagctcctcagttgtggcaactgaaaacgtctccttccagactttgcaaatggcccattggttcagaacctctgaggttaaggaatgtgctgatgtggccttcggtgcctatctctacctgtggtttcttctgcctcctcccagacaaggtctccaggtgacccagctttgcttttgcttttaaggaacctgggccctatctgggatgctctgtctggatcggaggcatggacggccaggtctaggctttcccttgggagagaaccctgatgggttgaagattgtgtagcctcaagcctctttgctctccccatgtctgtgttcttaatgcagaggacagtaactttgaataactttttagagggttttttggtttggtaattgttttttgataatttggtggatcactaaaattattctccagtctaaactttagaaaaagaacttactcataacatttctcaccgcttttatattttgtttgtgaaaaattacatttgcaaaaagaaaagaaaaaaggatagccatccttctgaaggttttgactatatcttaaaatcctaaattactgatgcaggccaaacacagcttcttcctgttgggagtttctgctgtattcttgttgatgtcagtcatataaacaaacttcaaattaaaaaccacaaggaacagctgtaggggctctggagcagggattctgcccggagacaggcaggcagcacaatcctcgagagttcccaggaaatgaaattccacatttggtgtgagcagcccaggtctttccatggtattcctagcacatacggtgtgctttcaagcctttgatctataccctctgaagggcctatgttttacagcctttccagaacacagagcccagggctcacacctatcgattccaagggagcaagccatcaaacttataccaattcttgaaaccactaagatacatttgcaagataaatgggttcaagctctcctacatcccacggttctatacttggggtggggtatttagaggtagcttagaattacagtcaagtaaggtccttcactttttgtctgatagaatcatcccagcatggccccagatcgttcttgcatttgtgggtaaacatcatttgtcactcataataagaaagtgggaagaggagaatgttaacatacctatagataatacatgcactgttcctgcatgtgtcacaattagctgtgtcttgccccgtccgatatgaaagcctacaagataagaacaggagagcattacaagcggtggctgggggtcactggctttatagagcagatgcctcaaatcaaatgccttcccaatgccaagctcatcatggtcatggaaattgattaatgcatgcttcccagtttgctcctgtctctgctttcgttgtacaaaaccaatgcaacacctacagctaagatgatatttaaattaaatttagaagtgaacataagctcctggatgaagtaaataatatgatttcgttataagcacagggaatgtgggatgtttcaatgcagatttatggtgttttaaagaaactttgaggaaaaaccaaccacatacacatatgctgactccatggcttatgtttgctctaccccacctgtcctgctacaactgggactggcaaagtgcggcctgcaggccaaatcccgccggggcctggttttgtccagcaaactaagaatggattttacatttttaagcacttgaaaaaaaattgaaagcatataatatttgtgacacatggaaatgatccgaaattcaaatttcagtgtccatgaataaagtttttacttttgaaaataaaatggtgaaaatttttatgaaaatacctatttctagtatcctcaattttgcctcttggtctgcaaatccctgaacatttactctctggctctttagagaagaaaatgccaagccttatgttagaatgtcttactcccattgccataacttctgagttactttccctggctttattctctggtcagttctgtcagacccctgaggccgggcagattttggcctttgtaggggaggttgctaattctcccccctaattaaaaaattaataataatgatcttggggtctttctgtagtatattgttgaaggttgtataaacataaagggttgatgatgagaattttctggaccaggctggagttgccttggctgtttcttggtccagccacgtaggaacagctggggagtgtttcatgccttcacagtttctcctattttatccagcctttcctctctgacatttttaacatgcagatgtgtattttctggatattattttgtgtccaggcacagacatgataaccggaatgttaaatttgtggcaggagaaaagctcccatctgcattagcttataaacactctgggggcaaatttccacgtacagagctactcaccagagtaacagtgtgcacagaaggtcttctgtcaacattgctagtcagtactttttatcccctttgctgtgtaaacttctctgcatcatgggttttaaattgaaaataacttttgttttcctcattatattgtctgttacatcaacatttgacaaaaggattgtctgctacatgccgtgattgtctcagtgggcttgcaaaactcagacgtgacctcatggttatgtgcagtttgttgatcaagtgaccatattctgctccaaagtgttgccaggcactttctgtgattcatcatatttcagccagaattggaattacagtatggctgtctctatcgtctttccatcatcacctcccacatgaggtgcctttggaaccccacagcaggccattccgttctcccgttggctttgtcaggagagagggggatgaacagcctgtgccttatcccctccccttgttcctcaccagacacggtgattttgtagtccttacccctttcctcctcatggcaagccccaagaatgcattcctcctgcaccttcccacctggctccagatttgtccaccctatggcaaggctcttccacatgatgacatcacccttctcccttctctcttgccctatatagacttacagcctttctccatcagctaattctactggagctcggctctaagctcagtgctgaccaaggtcattttgcacagtgaagtcagtgccatccttgagctcaggtgctggcaatggcacggtccacgctgaatgtgttgttaaactgttggcttgggtggcagatgaggtactgctctactattgtgttgtgctagtgggtataagccagcagtcaggagaaagtacctagtacttgtctatatgtgctagtcatatccaaattttaggttcttacagtgggcgaaaccagggatatttacagttttctgaaggcactctttttgtgctcataggaaagtgtgaattctaagcttatagaaccttcctgccctaaacctcaggggaaatgtctatcaagcctcatcaacatcaacactccttccttgcccagtgtccaagtttcccagtgcctcacttgcattagagccctgagccttctaattatgctagccccacttacagaggagcatacagtcacacttcaggtccaggatctcattattcttaggccccaggcttctgatgctccctgtcaccttgcttgtatgctggggctggtgttctgcaccacatgtaattggcagcttgggataggcaatgaacctgacaatgagaggacaaaggcttcaggcacctgaaatgtacaagaggaatcttccaggaccttggagtacttcagtaagaaattgcttttctgaatcttttcttctcttttctttacttttcttttctctttttcttcttcttcttcttcttcttcttcttttttttttttttttttttttgagaccaagtttcgctcttgttgcccaggctggagtgcaatgggcacaatctgggctcaccacaacctccgcctcctgggttcaagcgattctcctgcctcagcctaccgagtagctgggattacaggcatacgccaccactcccggctaattttgtatttttagtagagacggggtttctctatgttggtcaggctggtcttgaactcccaacctcaagtgatcttcccgcctcggcctcccaaagtgttgggattacaggcgtgtgccaccatgcctggcccgagatattgctcttctaaagcccttcctgaaaagactttactgcagtcactttgtagaaagcacatattcctccattacggtcagtaagcaaatagttattaagtacatactaagtgtgaaacatttttctggctctacaggagacatttgcgaataagatggagtccttgtcctcacaaagctcacagtggcgtgggagtggcagaagggcaacataaatgcataaatgagcgaacggttaatttttgatactgctgagtgttaaggaagtgttgtgaagcagtattttggtctagaatgaactctaaggaggtgacatttttagtgagacctggatggtaatgaaaaagcagtcagtcatctgttgacccagggttggatgttgcaaacacaaagaccgtcacgtgttaacatcctgcagtgggaatgatgttcctctgtttgcaagtcagaaaaaaaggccagtgctgctggaatagatgcagcaggtgagagtggggagagatgaggacatgtgtataaaatgagaggccctttgggcattattttaaattgaatgggaagccactatagtttttcttataggtggttgaatgacatggaaacacttcttgacttttactctcaatcctctccttctataacatcattttcactcaattttctttctcttgcttcttttatttacaacccagcccaattcaccaattcctgagaaatggtttggctgacgtttgttggtaagaaccaaaggagtcattgtgttttctttggagacatatctgtggtcattctttttttagctagttgaaaacagtgggtggtctgtcagtttctaaatatatgtatgtttctcccatgtgtgagaattatttttaggacttcattaccatgaaggtgaggttttgtttaagttttgtttgggatctttcttttgtttaaaggaatcagttgtttggagtccatgaatgtcagcaggagattaatttgtgaataaaatttaaagtgttgaccttgtcatgtggttaattcacaggcagctgccagcagctggtgtcaatcagggtatgcctgctaaaattttattaagcacgagagtgttctcaatagagggcttaaaactatgtaatccattgtgcttactgctttcataatccatctaattgtccttgaagcttccaagctgtagggtttggcttcactgataattttatggtcacattaataattgggctgcagcatctgaatatgttctccaaatagagatgaaacagataagttatttctacaggacagggaacacagagtgctgttatggaatttccctattttttccttctcaacttggaaacacatcagaaaacagtactttgaatgattctctatattgccattgccataaggaagaacaacctaaaaactttaaactgctagagcagattcttctccagtgacagtagggctggagatcttttgtagattagaagtttagagaggagaaagcttaggttattgatgtaaaacctgcagtggaagaacatttggatcacaaattataaattttctgtcttgcagattaattgctacctttgtaaagcactcttcccttttgctttgaggagcctgtattatatatacataggcttgtaactccatgcgtgatacaatacctggtaccttctgggcgttcagttaatgttgatgtagccaagtcatagagtccatatttgtattttcataagtccagaataacacacttacctatttaaagaattccaactgagtgtggacaaaaaccctgacaggtataaattgtgaaaagttctagtcttcatttttctccccatatgaactcctttgggtgctaatgataagcatgttcattgtagatatggattttgtggcattcactatgtatcgtcccatggcagttagttgtaagtattctcttaacaatgcatatagcttggaaaacatcgcattcagcaccagggacagtgttaaaagtccaaggagctctctttttttggtgcttttgttttctgttctgttgaccctctagcctcccatccttctagaactgggttttatcccagggaccaatttggggaccctggacctctccttgcttgatgccttttgaacactccttggtcaaggtaggcttgcctgttagaggagcctggacatgaactgttaatagggaagctataagaacatagactctgcgacagtgcatgaaagagaaggtgatgctctgttagaaacagaagggatctggacaagccaattctacaaggtggtttttgtggagtccagtttttgagtcatttacatttctgttttgtagtgaaccacctttcttcacaggactttgctctactttaaagaaaggaaaataaacttggcttacagaacacagcgtggagctctagtcagggctacctctctgtaatggcctggacctctcaggtttagctcagcatgcagttccccagtttctctagctaccttatacctttataataatcggctctaattcttcagttgttactatcagcaattcctgaatgtataaataaatatatatacttgtatacttacaagtatataacatacctgaatttttttgtgtgtaaatacacacacatacatacctttgtaaatttattttcaaaagtagtgacaattcggggcatgcaggtcttcagttaatcctttttggaccaatagcaaaagagggaatatatgcacctttgtatatttattttaaaaactggtgacaatttggggtatacgtgttttcagttattccttttacggaccgttggcaaaagagggcatcacgggtagacatttgaaaagaaacaaagaagggcaggcccatggcagagctggtgctgcagtttttgtgacaccactgcaggaatgataaaggaggagggtggctgccggcctcagcctgagagccgcaccatggccacgtcctgggtggcagggactccgaggagcagggcacgggagggctggacggcatctgctctttcatgctgacaccacagggagatctaagtcagcagggccctgggtgttaggaagggtgttgagaaatgtcagagaaagatcactgcaagctttcttcccggccacatatccaagctctgcttagtgtctccgagaccttgaagatggggcctgagaggcaggactaacaactctgaggcaatcataacaaaacatgaattgtttggttaaaaggtcaggaaagaaaaaaaaaaaaaagtctctcactgtgctgtcattagaagcaaagaccgagaaagtgacaagcatctcctagaggaatggttagcaagtggaaactaattttacagtacctaatagtaattacagtactagtattgggttattggattgatgtaaatgtgctgtttttactgccatagtctcacaacactgtttccttcataagatcttaaattctcaatggaaagttctcttctcacattcctgggtgactggatggggcatttgtgtgtgcctggtctggttgcagagttcagcagcatgctgtgggcccctccctggaagatgtgttcagtactcagtgcaggggagggcaagtgacccagttgttgatttgctgctcttttaaatgccttgttaattttcagccagttcagagcttctagcatgtcagggagcagcacgttggatagtgctgaaatcaaagcatgaccttctaagtgtggtcttcaaaatgttcattacatagggtatggcaattgtcacactgaatcaattcagaggctgtatcctaggtttacctgtatggaccttagctagagatggtggttgttgcagatataaaaaaggcatggtctctgctctcaaagaaaatgtttttgccgttaatttattctcttaagtttgatctctcttgttctttcagttttcttactggatgcaacaaccgtttttttcttctgcattcttacccaggtttgtgcactagctgtctcttctcgataactaagccatcatttatgtcagcatcttgaagggctttttcacttaatagtctcaaagtgacattaattagaggcataaaatgataccaccactattgctgggagaaattaagtttcaaaaagtagtaaaggcactgttttcagtgattccctcctatgtttgagagccactctgagcagtagatttggcttgtttctgaatctaaggtctcaccaggagtttgccagattatgccccggacatgtacttattttagatgtcagctgtttacagctaaagtggatttagacttcaccatatactcatggaaacgcaagtacattgtcttagcatttgagctgttaaatgctagaatttgagggaacagccaatttatggttgctaaaagaatatgaagttgattttcataaccaactcccaggatcaccccttcattagtcaaaggcggtactggcttttggtgatggtttgtctgttccctttttcccagtagctgataggacccatctgtcagccagcatccaacttgctgaagtgaggctgagcagttatgagatccttgctggccttggatctccaagtagacaaagtaagttgttagtggtaaaaactgaagttgcaatttgaagagcacaaattgtgaccctccatactggcaaggctgtttggagtactgcctctgttctcccctgcttttgggatgtcgaacaggggtgagtgttgacacctctccagctgcccggctgccaccttttgagagttctgctggagcagctgttctttacggatcctttggctggctctcccccactctcctcgcctctgctccatttcctctgccagaacacctgtcttgccatgttgtcatggcaggctaatctttctttgttcgccagtcacagaggagatggcaagaaagatctgtgggtacatggaatgatgaatgaaggaacaaatgaaaaaatataattgagaaggtgtctttgtctcagatctatgggggttggattgacccctgttccagagaaacttagcagctttttcctgacagttaagtaaaactctggaaaactgtctcccatgttttctgctcaggacgttgatgatgggacaggcagtgtctgtggtagagttactttaatataaccaccactcatgggtttcgagaacgttaatgcgatttgatattgtctgattggtttctcttttctccagctctttcgcctgcagatatatgtcaggtggtaaagctgatcccattagctctcagtattctccatttgtctagaatgtctttctggggaagggcaaatacttctttttcagacacccgtgtaatctccctgaatatgaacatgcattttctatagtgtttcttgtatacagttgtgtcccaattgattagtttaagggagatctatttttgtcatcccatgtgagaacttggaagtaatatatctctaagaacatgatagttagatctgatagcattctaatgctgaatctccatatagattaaaggattttgagggctaccctggcaacctcaacacaaattacttagcaatgatgtttggagcacagctaattcagaagttgagttgggtctgtcttcatcccatttctctttaccttactttttttccatggtagggcaaagttctcagaatcacacacatcccattcccctaaagccaggaatcgagatttaaaccctggaaggatcacctgtacatgtaaactccatgtggtctcatttaacatgtcaggataattttcaacaagcctagttatttctacttagtgttctaatcatagaccttaatggactttgctacaaaggagccgacataacgagccggcctccccaggcctgccagtcccagttcatctggggcttgctgtgtgtcagcactgtgcatggcctgtgctggggaacagttgcttggaagaataaaacacaggtctcgcccccagacacttaaaatccagaagacctttgtttccaaaatgaaggaattcttgatgggttaaggaagcagagtcacagaaccctgaacagtagcactccttccatgggactgttctaacccgcatgcaaacctgcatccttggtccgggcccggcttctctcttccctccggggcagcacagcacatcctcagtgcagcactcccagcaccttgtttgtggctctcttgcagaccatgccactgtggaatctgatgatcagatgcactttctctgtcctatgggactgggcattttgctggctgggaacatgtctttgttcctcttcacaatcctagctgatagcttggtgacttctgcagatcggggcttgaggtgcatcagcaatgcctggtcctttcatgcccagtgaaagtcagtttccttcccacctctccctccctccctgcttgagacttctccgccacatttatcgccatggagtataccgggagctgtagctatttcgctttccctgtctccctccacgagaaggtcaacacaatgtgggcagaggtttttgtctgttcccgggcgggcaaactttcagtgcccacctcagggccagaagtagagtagatgactgagaaatatcttttgaataatgcttgagtgaatgaatgaatgagtgaatgaatgaggagtctgtgtgagtgcccttttgggtgaactgataacatgcccttttgcttctgaaagggaaaataggactctcacaattttgtgatgcgtctgtctaaatagtattcatattagcccattttaaatttcctcaaacaagtagaaaaaagatcagtcgtcttctgcttccgacacccagttttgaaaataaatagcttagtcttgcacctaaaccaggcccacttccgtgtctggataaagccttcctttttttttttttttttttgccctgaagcaatcctggtggacgtgttccaggaagaaacacccttaatgaactcagtggctttctttcgatggtgtggacaaattaacttttattggcctcgcagctccccagatgtggtgacactataattctggggaggctctggctgttagggaagttttaatgcttgttttcattatcaagaattaaagggtaacaatgctggtggatcgtggcaaagcatcacagttagcagggagattccaacctgggtggcgtcccaggggacgcaggggtcagccgggctccctctcctctctttctcccttggccctttgtcttccctgtcatttgcctccttttttttttttttttttttttttttttttttttttttttttgagacagagtcctgctctgtcacccaggctggagtgcagaggtgcgatctgggctcactgcaaactccacctcccaggttcaagtgattctcctccctcagcctcttgagcagctgagattacaggtgcccgccaccacaccccactaatttttgtatttttgtagacacgggatttcaccatgttggccaggctggtctcaaactcctgacctcaggtgatccacccgcctcggcctcccagagtgttgggattacaggcgtgagccactgctcccggccctgcctccttgtttttgttgctcctctctgtagccctgtcccagcaacttgtatgcttcctttttcacagagccatcatgcatgatgaagaaaatggaatgcatcagtattttatagacattattattgtcagaaatacatgcagatttggacagggacaaatacagagatgaacactattattaaggcaggactttttattttttagctttagtgccttttaatcatattttcataatataaaatcataacataaatatcaggaaagctagtaattattattttgtgtgtggactgcctggctatattataaacagggcaaagcttacattttccttccttcattcatgcagtcagggaaatactaagttgcaaaatgatgacaatgatacaaacaagtcatttggcccagaaggcaccaggagcagctattaataaggaaaacaactttttccagctgaggccgagttgattaacttattttcctggaggagagataaagcttaagctataatttattgaaaattaatgaaaatgaattttggtggcactggctatcaaactagaatgaaaataagaatgtgagtatactgtattaaaccaaattttccttcaggactcccatatttcttcagctcttgtactgtcacagaggttcgaatttgaaagcattaatgttgtcattttttgccagtggttctgatggtaaatatccacagagtcttttatctttaatttcttttgatgtgtgtttttagatcaagcttagttagcaatttttaatgagaacttatacatcttggagctttagtgctttgtttcaaaagcctgaccttgcatttgctttttaaacaaatgtctcagagctcttgttgccaaagactaaaatcttgaaattttggtgtgatcatttataaatttcttgatgtccagttatgagactttgctagggggataacctagtgctgtaaccaatgacatactgatagaaaaaactttactgcctttttggttgaaggatgctcgttgttagatcattttttcccccaggatctcaattttcatgaatgttctttccagcctatctttaaggtttatttttatattgcattgcaaacaatgcagtatcaaatgtttgttgttcacatggatgtggacatcaatatgaggaaggaagagccagacaggcatgtgacggtcctctgaaggaccactgatattacaaatggcctgtgaactgggttcccaggcaggttcctcaaggagagacgttgcatcctggcacccagatccctggacttaaagatcaatggccttgatttgtctgaaattacttcacagagaggattcctgttaatgattacagatccttcccaatacactttatttatgggaccctctcaatgaggggatctctgctgtctctagcaccggaaagatgctttctccagaagatgaattggcatgaaccctaccaggcctgggagggtaggagcttctgtagccttttcaagtaaaagggaaaatccagacttgcattagcaaaaaaattaaaaaatttaaaaaatgcctgcattttcttatttatttatttattttctgagacagagtctcgctctgtagcgtaggctggagtgcaggggcacaatctcggctcactgcaagctctgcctcccgggctcactccattctcctgcctcagccccccaagtagctgggactacaggtgcctgccaccacgcccagctaattttttttatttttagtagagacagggtttcaccgtgttaggcaggatggtctcgatctcctgacctcgtgatccacccacctcggcctcccaaagtgctgggattacaggcgtgagccaccgcgcccggcccaaaaaaatgcctgcattttcattagttcatgttggttccccattttcaggggagagagaagatgagtgggccggtctgacagcccagatgtgaattctggcattaacatgtcttaccagctttttgaccttggagaaggtactgagcatatccaagctctagcttcctcatggagggcattcccaccttggattgttactctaaagattaaagaagataataccaaatggctggcacattgtaggtgcccaaaataggtgacctctgtaggtcatctgtatggggattctcatttcactagaacgctccctcagctccagtgggaaatagagctcaaaccatttttgcatagcttagcaggaattgcatggagtttttaaaattatttgaaaattagaacttgcatttcattttttttttaaatccaaattctgggacacaaatccataaattccataaatgttcatgccatgccttgaattgctcattttatctgcaaatgggctgtctggattgcctagtggctcggtggtgaggcttttattcacctaccaacttaaaaggctgaggaggtatttgaaatctattttggcattctgcacaggaagattatttaaattacattttcatgtatgtgtgatacctacatgaagcccaaagcaagaatttgaaatgtgttttatattctttcaaatatattttgctttatttttcatattagagatggaaagccttattattttttaagaacttaaaagtagtgtttacaaagttatataaatataagctataaaaaaggcttgctgtgaccctgtgaattaaatgaagaaaatgatagaaagaatatgaaatgtgcttcccatttcaaaatttcaaagaaatgataacttatatttggggtttcgaacttgaatattctattgcaaataaataaaagccattagtttcaacagaaaaagaaaagaaaatggcttccctgaaaacaattcaaaggattgcaaccttgcaggacagagaccaactctagcatttgtagtactgggagagataaggaattgatgaagtgtcaagaggaaaaagaaaacagaacagtgggatcattgcacacttttattgatggagatctgcagcgaggttcccccccgccccgaaacttttatgaatattataaggcagtggctgaaattgtgatgttctcagacatctctatagaatatgttcttggagcagaaaggagcctctagggcctctcctctcatttggaccatgttcctttcatatcaaaaaatgtagctcagaggctaggccagggtgaactaaaacaaaatccaggtctcctgacgctacatcagctcccctgcccgtgacaccaaatgaactggtcctgtccttttctctggaaaccaccaagacaaagcttcatgtctccatttagtgatcctcaccaccaccccccatccccaaaatacaccaccctgtaaaataaagcaagaaaatctcttccctgtgttcaagctcctcccctggcttcacctccctgaatcttagcacttggagggttgcttcccagtagcaaagtaacctcaaaggtagtaacttactgagtgcaaacatagcctgaggactgagaccctctttgtccataattcatttcatctccaagagaagcccaagaggcaggtattctcagctgtttgttacagagaaaagctgaggtccagaggggttaataagcctgtgcacgcaggtcaggagagggaaggtcagcatctcaggacctgcagagtggagagcctggtcaccccaccctatccctctcctgaatctcactctggaaaaatggaagaaccaagtgcatgggaggctgacctcagccagctggctggaatgatttaaaatgttttgggttatgataaatgtggagagagacatcgaaactgatttatcaagaatattagaaaatgaagtgctgacatttccatgccattcaaatagggagtgctaaggcacaggagagcatttggcagcaacaacctttttgcttctgatctcagctcagcgctgctttctctctgctgctcacaatgccctgcttttctgtgatgcatctggccagagccagggaacacggcactcagtattccagagaagagccacaagatcattttcaggactgcagaggctgttgagagactgtctaatgtcacccacctcctctcctcaaaattgggccattctcagctaaccaggtggaagactttgatctctattaagtgggtaggttttggcaagaacaacctaatcatcctgctagagagtgcatagccaaattgggatgggatcacctcactgtgcccagctttccccttggctcttggaggggtgagcctgggaagccaggaaatcagactctaagcccacaccttcgtgattcctcagcgtttatgcacagctgctgcagcggtgcacaattttccatgtgggttctttctgctctgtaacttaaatagtccccttatgcttcctctgtaattgtgatgcagtatttattctgtttgggcattggtaattagagcaaattcagagatttcttatcccctgacaggtctctctgattctgagtgatttgtcaatatgaggacataagatacagcaagtatatcatttctacccatctagcatcaatattctaggttaacgcaagtcacatcacgcaaacatgttctgtgatggctttttatttctgctgctgggagaatgagacctttttcatgtttccaagagatgctgtcatatacattatacatacatattaggtatatgtgtgtcatacacacacagagttccaaagcaggaccccaggttgtatgggctgatgaacaattaagcgtatatttgaacagcctgaatgccgatgaactgtgaacccctcaaaggctgggcccgaattcctttgactctcacatcccctcattgcctggcacagtgtccatcacttcagtgatgtttggcagaaaccttctaaatgtgtgaatgaatgataggccggtgtgcttggcagtcacacaccttggactgcctgcacccatattctggcctgaacatttttagctgtatgaatatggtcactgtatttacaaaccatatatcaggagtccataacctatggcttgtggcccaaatctggctaccacctgtttttgtaaataaagttttattggaacacaagtatgcccattcatacagattctctgtgggtgctttcaggatacaatggcagagttgaatcattgtgacaaagactggctgtcaatatgtatttactatttggccctttgcagaaaagtttgctgacctctgccatgtaggagctgaccctgagcccctgcagtaaacacagatgtccatgagactaagtccttacctcttaagtatgtgtatgtgcacatgaccttccattacttgttggctattcattgtttttggtaaagttgagcaaaccttggtacaggataccacacttcgtctgtattaactcgttccatccctcagctctttcttcctctctcccttgtcttgaacaccaccgtaagcggcaccctcacagagcccctgaactcagggggttcctttagcttctttttttaccactgtgtgcccgagacttgggagagctggcctcacaccaccaagaaaccaccctttctcaatgaggatgaacagaacccctgctgacagggaactgcccccatgatggggtggcagggatgatgggaggtgataaatgactgggtttgccacccttcctgcaaggtactagactctttgggttggtgtgttacttaggattttctgtttttaatcatactcttgcctttgctctgaattagtaaagtcacaaagccccgaagcctcagggtcttatcactacctgctggtcatgtttaagggcctggggtcctcttgctctctccccctaccccaagcctgcaggtaacacccagcaaatgctgagggaggcctggcccatagaagaatctgcttcactctgggcagtgacagattctgatcatgtgcttgatatcctcaagtaaagcttctcacgatcatttctggtcttctccaaatagcagagtatcattaggctgtcaccagccaatggacacttcaagagactaaatgtttggcgtaggaaatctaagaggcaaagagcgctgtcggggttgccacactgtagttgctggtgagtttacccaatgagccaccaagacctacaccccattggtctgaggatctcctgcccaggaatcccatagctgctacagtgaattagcactgttctaataattgattgggttttttaaatccactgtcccatttgccttgttcttagccttcaatgactcccattagtgacttatttaggtagcctgtgtgaccctgaacttccccagaagacacaagcataatactaagagctctgaaataagcaggataattcttggcattcatgcaagcccgcactgcataaagcagagtgattttagtgaattgccccagtgttttacaagggactaaaaggcgtgattttgcatactttttgcacatctaacctacttgcagaattcatcccactgaaatgctcgtaacaggatatgtcctttattcagcgccaactgtgtgctggttataagtgggagctttgtagatactgtatttcagtgtctaccacccctagttgatttcagacaaaattgaagctcacagaggttaacctgtctcagccataaacattctctgccgaagccatttggaaatctacataagcaaatgaaaataatgaaggagagtctcttacgaaaaataatttggaagctactgagagcggttgtagccagtgacacagaaattcctgcacaggttaagaactacagggaagcacttgcctgacaaactcaatagtgaaaagaagtcctattaaagagattttacaataaacatgttctaagaaacatacattgcccagggccatcagcgggattcaaagaatactggcttcccaaggagcaggcccatgacccctttgggccaggtcagaccttaagtatagtgtggaaatgtgggggcaagatttgtcacttgtattcaaactcatgggctccgaggtgcctgccctcactaggactcttctgaatgcagatgaaattctgttggaagcccctgtatgctttattggggtggcaagtggggagaggaactgactttccccagcttcaagagtgttctccagctcctgatttgtaggctttagaatattttccaagaaaagttccattgattttatttttatttttttgagatggagtctcgctctgttgcccaggctggagtgcagtggtgtgatcttggcccactgcaacctccacctcccgggttcaagcaattctcctgcctcagcctctggaggagctaggattacaggtgcccgccaccacgcccgactaatgtttgtattttttagtagagacgggatttcaccatgttggccagactggtctcaaactcctgacctcaagtgatccactcgccttggcctcccaaagtgctgggattacaggcatgatccaccgtgcccggcctccactgatattttaacttggtcatttgagttcattgtcgtatcatataataactatgtatcagtgtacacagagtgcattttcctgttttctttttttgtttgtttgtttttttaaaccatgagatgcaactaaaataccaacttcccagttcagatctggtacataaagtaagccctgtgaatccctcgttctaaagtcctagaacttgcccttcaagggattggttgggtgctgagtggagcagagtgttacatttttaggatttcatgagattgaaattggccacggtagcagtatttacaccatggaaatcagcagatgctacttcccttccctccagagcctgttgttccagatgtcccagcccagtgctggctgccactgctcacagctgtcactcctgggactctgtgctgtacccagggtctgggaagggatggagaatgagcttgcatcttatctgcctgtctctgaggctgcagtcctctcctatgttctgacatggagaagacgggtgggaaatttgaatttcagccaaattaatgaccctggggcattgagcaagagggggccccataaggtggccttgaattttggagcccataaggtggcacttgattctttgctatctgagtccagagggctctgagagagaggaagtgaatgttcccaggaacacaacagagacctgcctttctaccttccaccgtgagcttgtgctggcagcaactgaactaggattgattttaaagtaaaaccatcctttgtcttgatttaaggtgcccaagtcctcagatgcttaagaaccaggcactgtgccatgttctgggataccggagtgaatgacatttcgtgatgatggaaatgttccgtagctgcactgtcttatgtatgtggctatcgagcatttgaaatgtgactgctgtgactgtgaagtttcaattgtcattgagtttgaatttcaatagccacgtgcagctagtggccactgtattggatagagcagctccagagtttcagggacagtcttgtgtggcagcctgtgtgccgggcatataggggatgcattcatcacattggacgcccacaagaccactaagtcctccccagacccctgctccagcattgctggccagcaagatcaacactcatgccactagtggacatctacccattcagacacacctgccactaggctgaacacattagaaggtcaccccatgtcattccatcccctgtctgcaggacagacagtgatctcaacttacaggtgaagaaagaaggcacagagacatacagcccttgcccaagccctcagtgccagattcctacccagacatgtcttagtaaactgagaaccacactgctagatggatggcatctcagagaaccctgaggatcttatttaaagcaatcttccatacttgttctaagaggagtgtaagaaggcgctcccatatatcgtacggttttcctttcttgtgttcgtgggtgttcagccctctcaggttcttctttgggcacacactcctgtgagtatgcacattagtgtacatatttcattttacaccatttggtgaactttatttcaccaaagatgttggcatctttctcttttgctgtctggtttaattcactaccaactatatcaacatcagtgactgggtcaatgtttgaccttttaatttttttgcaggaatgtggactactgatcagtaaatcactggtctcccccaccccacgcctgatgagtgttgcttttggatctgtactgatggaaatgggatgaaaatggagatgtaaacccaagattgaacaaggccttttggaaatgttatatggtgttagattacctatgaatctactgttaagatttttgtacatttggctggcagttctttttgcttaagagcatcaagctgtagacaggcctcctgcaccaagctggagcagccagagcccagggcaggacctgccccagcctctccactgctggagctgggcctttcacctcagcctccaccttaaggcaggaggtgtttcctccccattctttgcagtcagcaaactgtctaactcagccacagcaatcctcttaaggaaactttgtgcccaggtggttttctgtcctggaaatacattacttggcttatttcaggctggcttctagcttgctaaacccagggctcagggctcgcagagtgaagggtgcacatcacatgaggcaacagggcgctgcctccgatgttacctccagtacacaggctagcaggaacacagacactttcaaggggcaatgggcaagagaggtctcggcaatccaggcgaagtccgataacccccagacccagagtagaacaggctgctttgtatcagctgagcacatgccggcctgtaggaggcttccgcactggggagctcaagaactaaaaccccacctttaggtcatttgtttttaaagatgctgctgcacagtttaaacttcaaaacatgaagtgcaagatggtcttatcaacgcaataaagtattggccgtgaagttagtatcattctttctgcagccccactggacacatagggcagcccgtggggaagggcatctgtctcctaatcatatacagtcaggactggtctcacaatgcccattgcttctttgggttccaggtacagaatggaaaacacactgtctatgatgtaaagccttgtacagtcctgaataccaatattatttcaattatttattataagcaagtcagcatttacttttccaaatgtcacatgaaatttcctttctcttcctaatacgattcctaagaggcctgtggcctcttctcttcctgattctcttcttatttagaatagatattttggactggcatatgttgttatacattatcaatatcataaacctttagccctagcagaataaaaggaaaggtctatcaattcattctaagcataggtatggtttgaattcaaggccagaaagatgaacattaaccagaaagcgtatcgtgcaggatgcagtgacgtctagtatcataaaataatctgcgaccccttggagctcgccacgcccttagactatgacctgtttacggaaatgctggctttagtctcattacagacttgggtttggggctacagatggactctgtggtgatcagcctgcatagcttcctaagacatgggtgaacatacatacccttcccgatgggcctctcctttttccaactcctgaatgacccccaagagcactttgatggtttcttggcttgaactgatcaagttctccatcatctgaagttgtgctttgaggtcgaccacttccgtatgaggcacgattcgttggcattcttcacctgcagcaaccgctgtgggactaggctggttccccagccccggcggggtgtgagtctgcgacggctgctcactacattcgggggacaggcactgcatcgggggtgagcaggccagggcagtttccgagggcgcctggagcccgttgagatgtgtggctctcctccgctcgtcatctgccgggcagagtgaccactggctggcggctgcagagtctgacaaaccaggctcgggggccctggcactgagggcaggtgcgtaaacggtggcaacctccgttttaaacaccctcctgagggcaggtggagcgggctcctcggagtttggcctcccccggtcctgcttggccctcccgagcagctggtaatcgggctcttcggatggaggccgagtggagttttggagcgcagcttctccatagctgagcggctccgggcttttacagggctctgtgcagttgacccccaaaggctggtccactgtgttcatgtgttggttggaatggaaaaccaaggctgtggtcttgtgcacccgccccgcgccacatggccgggcctcctccatgggtccagcctcgttcttctctttcgcatctgttagaaacccattgttttggcttttaaagggatctgcagctgggaggcttttgaggttcccctttttgcggtccagagggaacgtctggtaacacttcttaaggtcgggcgaggtctgcacgcctgtgctcttggtgacgttggggatggacctgcgtgcgggcactgtcatgtatttgcggtaggctgctctgcaggacacgggcttggcctcccgcttctcccccagctggcccgaggacagctgtgtgtccctctgctcattctgtgcctcgcagatatccttaaaccgcacctgcagggctttgttccgttttttaatctgccggttggggtccagggcgtatttcatctccagggccaggcaggcggcgggttccacttcactctccgacgttgtgagtatgcatttgccggtgtccttactgaccatggttcctgcattcagaaacagcaacagaggtgtcagtgggacagaaatacacactcaagcaccggccgcacaaacttttagccaccacgacgactgcctgtttcctaattatatttaagcaggtgaggtcggcctttatgttaaggaaaatcacacgggctgagagtcgctggcagcacagcttgaaatgcttctcagatattaaagcctgcttgcttttccaggtgggatacactcgctttccttttgacagtaatgcatgtttccccattagacaaacctgttttactacattcatcaagaaacccaatgatgctgcctcttctgctttgcaaattatcttttcacacgcgtgactccccttcttaggcagatggtttaccaagtgctacttatttggtttgcgttttgactattttttgaggatgacgtcattaatctattgctggaatctgggagagctgctgttttaaagacttactggagctgccacgtctcgagcagataaatgtggagagccctccgaggaggaacggaaagaaatctatttgcgtgagccgttatggattccgggggagagttggccgtgctcctgggtgggaaccgtgaaggagaagtcgtcgaggggtggtcgcttctcatgggttaacatcagctctaaaaggaacgtgggtttccctgcatctacaaaggccatgtttgcaactccttttattccatggagagtggtactggaaaataattcttaaaaaaaaaaataaaagaaattactcattctagaatcaagttttgtgttgtgatcacaacctccgaaaatgaaaacaatggtggtggtttcagtacttaaattctgaaagcaaataaaactatgaggctttatgttaatcatgcaaattcatcctgggctgaattattaaatgcagctaaaaagatgcaggtggccaatgactcctctcggggaataccagtggggtaaaatgccttcactttattaggcggattcacagctgtttattgcacatggaagaacttatttgatggctgcgcttaaagcaagaaaatagagttaagtgtgttgtttgtgagtgaggcttcgccttttccccccttgtgtttgagaagaaaacagtcaaacggaaggcactgagggtgtacggggcccgagtggctggagctgagtgcccagagaggcaaggtcatggacatgggcccgtgagagctgcacagaaacagacttcgtccacattgcccccagcccagctgccgaccttgtgccctgtcctgggggtgtctgaaaaaccagcccagagacctgtggcagcactcattggaaaatgccacaagaactatgacatgcgcagcatggccactgcttctggagtgaggtggttcgagtgccagatgctctgctcgttcacatacagaatgccttgcttacaaatgttcctgaaggtcaaggctacacttcccatttcaaggaggatactagggttcagagatgttgcgtcatttttcggtgtcacacaggaaataagcagcgcaggcaggagcaggaccctactttagtggaccgctgaatccatgctgttctcatagacccagctgtccaacagacagaggcatgacccctccccacatccttagcccttactgagttagcatgacaggccgaggtgcacggtggttccataagggggaagaagagacaacttcacagccaccatctaaaagtaagtgacatgactagccctctattaaaatgacctctatgtctcaggccagcctggtcttgtcaccttgctggcctccactgctgttcactggatgaaagagtgaaggaatcaaattcttcatacattatgctatgaacaactaacaggtaatcatgtgtaagaacaacaaaaaacaatctctgcagcatttgatttaggtgggaccagagtttctaaatcctggcactactggtatttcaggatggatcatttgctgttggaggggctttgctgtgcggtgcagggtggtcagcagtccctggcttctccccactgaagaagtagcaccgctccctcccagtgtgacaactagaaatgtctccagccattaccagatgagcctgggagcagagtcttgcctggcagagaaccactgcattagcccttgcacctctggatgcctcgggctcttgttcgattatcctatagtgtgtcctgaaaggtgaggcttgcgtagacagcaaaggaagtccttggtgctttactaggtgctgggggtatttggagattgctgcaatttgaaacttgaaaaactgggcagttttagagaggagagaaaaggcaagaaacagactggagatgcaccaatatcttggccccgtttgggatggctagatgataggtggaaggagggacaaggcgtgcctgctcaggagaaagcatcgatggcttttagagattcttatcccagcaggttaaacagatgcacacaagacagcttggtgtgggggacagtatgggtagcagtgggggtggaataagaaaattaaatcttaaccttcactctgatctcctattcattctttaactgcctttgttgtccaggtatgtcagaatgtattgtgccatcattctgcagaagaccttcatactagggaaaatttgaaagagagagcatttttacaaaaagcaatttactagtaatttatcagccttttccctgctacttctgaaaaatgtgtgtctgaataagtttgtcctgccatgctattcatcatcaccatttgctagggactgcactgaaataattttcttacatcagttggctggggtaagaaatattctaggtcttggacgcaaccatcaaactaatacaacaaatcagaagaattaattgctggtggccaaataataataaaaaattctaagctcttctctgttttatagagggttgctggtacataaaaatcatttcgttgttagtaaaaaaatgatggtaatacttaggatttttaatcactttagtttgttattgctgacttaaaaaacagtaatagtaattgagttcttattctctgatagggaaaacaccaaggaatttttgtggctggtttattttggcttcaaatgaggttatgagttctttctgacggctggatgacattttctaaagctttaaaattgaatttctggacattaagaattactaaggtggacacatcttttcggggtgttcatttgctctttattgggggtggagggtaaggcttacagtgattaccattaagaaaatgattttgttatgaaaggaaatggggcattctacagaggactttccctaagacaagtggaaccttctcccacactatttcattcatcattccttcatgcatttattcagcaagtgaatgtacatacgttacagtgtagcattaacattcagtaagcatgcagttaagtgctcctatgtgctaatcaaatgtcaccattcccctatgcatagcagttgtgttttctagatttgatcctcatcatatccttacaaggcagccactattgataccctcatactgcagattgagaaaccgaggcacacgattttgggattttttgcaacttgctcagagtgaggaggctagtgggccacacccattgaaacagctgaatccgtttgaatcacatgccctaacccactacccctgctcaaggaactctgtaacttgaagtgatccatgataaacttgaaaacatcaaacaactgaaactcatctgagcaatgcccttgtcttgttcccacagtgtatctgggtgctggttaggcaaggacatccaggtagttccggtaacacagtgggtgttggagcactgagtgaatgttgccttgaattctggactgagcatgaagctgcaataggattcttcatgatggcttgccttggctgggtcaccctagagaaccatggactctggtttggggagctgatctcttggctctaaagcagcaggagttcataaagtttatttttcgtaagaaaattgtgttttagaattcattggactgtgctgtcttgaggtgaaaatggctagtcatggttgtgcctgtttggctcgagagagctagatgtcgaggagctgtttggaatataaatgtcttaattaccctcaaattaaatttcataatcaaagtgagctgtaaatacataaaccctgcatttttagattagtgacggagaaccatctctgcatgctgctttaaattaatggctgatatgaaaatgtgcattccaacttaaataagtgaaaaatggaagcaacttaatggctaacaataggtaaacagttaagtaaattatggtttacattcactctgggcggccattaaaaggataattatagagattatttagtatcatagaaaaacacgaaataatgttaagtgaaacaaagcagtctacagattatactggaaaaaaatgaacaaaaacggtcatcgttgtggtattaagatagcacattcggagagatttatttttccttctgttttccaatttggggagaatggagggaggtacagcgtcgttctggttttgccaatgaaaataacacaaggtaaaatctaatccacacctgaagcaggcctctggaaggcataaccactagtatcagaataagaaaaacccagaaatgatgagatggggctataagtaatttgtcaaaggtcatcttttattgttttgagggagccctgataaagaatgaaaatgaatttcaagtgtgtatatgtatgtatatatgcataggtatatacgtgcctgcgtatgtatttggctatgtatagttaaatgtttagcagaagatatgtcaatatttgagcaaacgtactgtaaggaaggaagttagcatctgttttaattagaaataaaacagactcaatagtctgaaggcaattttgtggggttccattagctgccaagagaaactctccattggattctgtccattcttaaaatgtccgtgctgatttgcaggtttgcagtttgaccctgtgatgggatttgtgggggaagatgcaggcagctgccagtctgaccgagacacctcccagggcccagcagtctccgcatatagtaagatagctaggcaagcagtcagaggagtgccacaagggattgtatgaaattatgggttttcctagtggctttctcactgttcagacaccttggagtcaaagatgctggtggggattcaagatgaactgggtcagcattttcttccatatgccaagggggtgcctgaacatgaggctactcagaatgggagaatggtgaaaatgaacatcccattcttcaccaccggcttccaccggaaggggaggtaaaatagaacctcactcactaaatgaagtcactcacattgtgaaatagttaacttagagacctgtttcataggtgccaattgagtcttcagaactggaagtcctcttttccttggggcaaagccagctgccatagatggtggactgtgtcttagattcattatccggtttaattttctttatatagtgaaatgttattttttccctacatttgttgttttcagcagaggtcactgatgaggaccaaaaaggggtgactggatgaattcagacacccttgtgtgactgagcaatgcgtgaggaactgttttcttgcagaactatggctccttggaggaaacacggagatggcacgccccgttccctcgatgtgtagaatattgcagtgaaacctctgtcattaagaactgatgaccacctagtccaaagcagggaaaaggggcactcacagaggttaaatgtaggcatcgaggcagaagaaaacctatcttaggttcagcccccactcatgcatatctgcggttttagaaaacactcttaacgaacaaaaaaacctatggtcagttgctttagccacataatgtaaaccacaaaggctcacactggcctacttcggggagtgagaacaaaggagggcaagcatgcatgcttggggcttggtgcttggtgctcatgttttaaaagaaccagggaatggccctcttaaatggtccagacttttaatttatgtttcactacccagttctttgattttcagcttatgttgatgttaacctttgctcatcctgctacattcatagagatgaattaccaaaattttatgatgttggtgaaaatcaactggaaaatatgcctccttgaaatgagacattatgtcaatgtaaaaaaagttttatttgcagcagttagctatgccagctaataatggccaaaaggagttcagtacagttggttccaacaactcaccaaaatcacctgtgagattggtaaaaggaactaatttccctgcctccctgtttcccatcatcatgacagtgacagagtgtgagacaggagggctgtgctttgaacacagctcatgagtacctttagttacgatagcaggtgtcccactgaccctggaggcttcctggtgatgaagcaacaatcagctggtagtttggggcccatcagaggcgggagttggcaggacacagaagaggtggtctcccttttttagacttagtgggaatctcactcacatgaaaacacaaagatacatactagaatgtacttggggagtgctttgccttcctgattatggtgaatctttttttttttttttttttttttttaactaaacagcatgttttgactcatgatttatctgaaactaaaactaggacattgattttttcccccctaaaaatgacttatatcaaaggagtctgttttccctgacacttcccagtcttatttgaggataccctattgggacaatcagggcaggatatctgcttggaggtaatggtcactacaatggaagtcatttagagttgaagatgcagtctgtctttctggcaaggccatgggaatgcccatcaactcgaccatcagaatggatccctcttgtattttcatcgtagtatgaaaatgccacaatgtttctttggtttggccaaatcctaaactttgcatggtcttcggttcactgcagaggtagctgtgccaggaagaaaaggagacttgagcatttcttgtaatgagcttctattcctaagctgatagccaaatgtagagaaaataacctgcacttggggtccatgtacacaatcctaaccgaagtctgcagaaagagttagtgcttgtaatcttctcggccctcatacagtttgcagttcatggcctagtctgaaaagactgtcttggtttgaatgagctattcattgcaagtgtgcacagagcgaaattttagcattcataacacaaaatgtcatttttgttggggggctggtgaagagaaaataaacaaaaggtctatatattgtatacttgaaactgtatattttattccttaaaaatctacctcttatcaatcctggtgttactctgccaggttagttggttgtttaatttttcccttgaccagcagctgttgtgaacctctgtcttctctgtgcatgataataagtagctactttttaaaaacatgaaaccatatccttccctcacaaagtttcatctaatgtcttcgaaggtttatctctttgtgcatgaaaaacttggcagtgtctctggtaatctggaggaggaggactcagtggtctttcttgggaagcagtctgacatgatgtaatgcctgagacccaagggtggcctggactcaacccagcaacacagctactgtgcttaccccagctgagcttggagcaaaagacaccccatgttaaaggcaggactggacttggtttgcattggggtcacgagacccatctccaacttagtagattctgtcagtatttttatgctgaaggcttccaacaagtgctgccaacggcttgctcaattcattccccccccagtctaatcccccaaatcagtcgtcaccatgccctattcgtttttgtttttccttcctgttgcttctcctactgatttcttccctttagttccacactgttcccaccctgatcttggccttcataactctcctgccctcagctctccattcccccatgccccacccccgtcccccatcctgcaggtcctgctagtcttggcttcaagtgcacacgtcgcttctctgtgcatatacctggatacatcccagttggtagcacttccaaagagtctcttattataagatcatctatactttttcctacctgctcatctttctagatttctcttggctactcagaaatgctccatctgctgacttccattaagccatttcctgcactgtctcctgaacacaccatggtcagtctctactttgtgtcttcacttccactggttcattttccaggaccgcgccctggtcctccttcctcatggatagtctgtgtttggtggtctagatctagtcttatcttctatgccttctccagtccttacctgtcaccttcatttactcactgaacagtgcatgcctggggtgacctaggcaccatactggatgctgggcacacaggaaaaaacaaggcatactctttggcagtgtctagtccagcaggagagagacacgttgatgcctgacaccagtccactgtgcacaagaccatgtaagaggagggaagtactgagagtgctccctggggagtcagggtaggctctacctgggagatgtgcaagagcaggcctgaaggatgctcactttgctttgctttgtgtcggttttctctccttaacacaaatataagtgttctgtggagtaggtccctctaagtcttcctcctatgctcagtcatccttctttacttactggtttaagaatcttaacactggccaggcacggtggctcatgcctgtaatcccagcactttgggaggctgaggtgggtggatcacaaggtcaggagatcaagaccatcctggccaacatggtgaatcccgtctctactaaaaatacaaaaattagctgggcgtggtgatgcgtgcctgtaatcccagctacttgggaggctgaggcaggagaatcgcttgaaccagggagtgggaggttgcagtgagccgagattgcaccactgcactccagcaagagaatcttaacactatacatcacagtatccttagagctgggaccttagctgagatacagcaagaagacttaggatgagtgtacaatattaatggcttccaaggagtctttttacattatctggatcctcacattaggtagaacctggctgtataatgaaacatgagtaggaattagagaagtggaaaggagaagggatagttttgttcgttgaggtaaaaccatatccagagatctttatcttctgaactttggcatgactaccttgagtggttgttgtacaaatgtttccggtgctgatgggagagaaggagatggcacacacactcacaaaaatgagtagatggcacagaaatggtacaggttctatatttaaccatgcagtatattggggccccatactgttgtagaaaatgtgacttgctaggaattatcagaaggtttgttcttatattactcaactttcttcttgggtactcccaagatatggtagtggcaaaataaattgagtttaattaaaaaatctcaatagcttggaataacaacgttttagagcatggcacctttcctaaactcagttgtctaatctgctctagaggatgaatcactggctttcagagggaaaaaaacaatagagggtctggggcatacccagggttctagtgacttccaagggtgtattagtccattctcacactgctatgaagaaatgcctgagactgggttatttataaaggacaggtgtttaacggactctccgttctgcattgctggggaggcctcaagaaacttaaaatcatggcagaaggcaaaggagaagcaggcaccttcttcacaaggctgcaggactgaatgagcgcaagcaggggaaatgccagacactagacatggtggtgcgtgcctgtaatcccagctacttgggaggctctccttaacacatccgatagacaaccatcagatctcctgcgatttcactcacaatcatgataacagcatgggagaaaccgcccccccgcccccccccgatccagttacctccacccagttccacccttgacacatggggattatggagattacaattggaggtgagatttgggtggggacagagagccaaaccgtatcagaggggcataaacatatgaatgaaatagctttcattttcctgttctttagactgagaacaatgaatataaaattatactaaataaggaagcgcagtacttaggaatctcatgccacactgctgttgtccattgagatgaacgtggagaggaaggagaagggcaatggggatgtataaagagagagaggttgttaggggaacggtgagtcgagagaaatgcacagacaaacagacacatgcacacacagatacaggaggggaaggggatgtgtgctggaacataagtccaggtcagctgtgggacatctgtgggctgttccttgaatcaggcacatagagttttgatagccttcagccatgactcccagcgttttggttgctcttaaagggccagttgcagcaaccccatctcctgtccagaagggaacgtgacaattcaccccggggcaaaacaagagcccaggctcgggcaggcacccaaagcaggacatcatacagtttcctgttctatgaagcacccaacacataacacattaagtgttaaactcaatgaagagtcccattttcagcaaatattcctgcgtttgcctctatctttttatctctccagcacctccttggaacagatgccctgctactttacaaggcttgtggaaaagagaaagagaacagtagcaaaagcctgtgtagttcatgaatagaagttagcatcgtagtgagtaagcagtactgatgatctgtgaaatgattctctgtggacttgagcatgctaaaaagatcttgaaaaaggaaaacataaatctttccaaaacctcacatgacccctgtatgctttcgccttcttgaagctttggaggagagcataggtgtggatgaaatggagtcttttaaaagttgttttggtttttgtttttgtgtgtgggtttttaaagagagcatatcctgccacgtagaagaaaatccagggggtggctgtcctcctacaggaaggaggtaaacaagcatttttccttaagggctctattccctcagcctcgctccctcgaaggccacacttggaggccaggaagttaatccattaaaaaacaaggagaagaaagagagaaagaaagaaagaaagagagaaagagagaaagaaagaaaagagagagaaaagcaagcaagcaagcaagcaaaagcaaaagcatattggtctctaccccagtccaggtaaatcagaacttctggaggatggagactgggttccactgtttgttttaaatgcctaatataattttaataatgcacatacgataaagaaccactggccttcttcctttatctttttcaccctttgttgtcttctatttcctgctgtatctccaaagcttagagaagtttgtggcatacaaaaagtacccagaaatattgactgaacgaagggcttaatgaatgagtgaatgtcacgggggagcagggaggttgagccccttccatttttttctagaatgaacctggacatcagccaggtgttgggatgatcaccagcagatcccacacaggcccacagagtgtctgtgccctggcctggctgggctgtgctgtgcacaaacagatggggtggattcatgttccacagaggagagagctagtggccagttattgtcatggatgaaaatccaggtctttcacaacatccattaattatgggatggcaaattccaagtaaattgtcactgagcagacccatagtaggaatagggcatattcacacttttttttatgtatatatatttctggttggagacgcaaaacatttagaattctgttcccttctagaaattccatggcttggggcagctcttttcaaccatggatctggggtttgagaccagtcattcgtacattgacagtctttgcacagtgaataactctggaatttctgcattagagagggggtgctcaaggtcttcccatgctaccatggtttgctaacgtggttaatttctggccgtagtccttacgaactggggctttgagaccacctgcttggatttgagttctggcccttcccctccacttaatagcccagaactctgggcaagtgatctaacctgggagagcaaagatcagaaaaggtaacacttgtgtataacactcagcacaagctaggtaccgttctgtgctttgtgtatgtctgaacctttcattctccaaacaccctctgaaggagaaattactatttgtaataaagatggggaaacagaggcacaggtagtggagtcacatgccaaaggtcacacagatactggcagagccaggagggcaaaggaggacagcctggcctggagcctgttaccgcaccaccacgctgcactccactgtgagctgggtcagggctcaggtggtcggctcctaggaagcgctcagtacacagccctggtgatgaagtggatgtacacaaagacagcacaccttgggatgtgttgtgcatgtggatgacactggatgcaggacctacgagacacaagcttgagaatcaccaccagaaggttccaaccttgagtggctgattaaaaactgtacggttgtcttagacttatactttaaagctgcatttgctagtggtcactctcactgactcttcagatacagttagaactgatgcttccatgtggaattattttaaataattactaggagtgagttggggtccagtctctgccactcactcagtagttgacctgcccagtgcagtgtggggccaaccctgccagtgagcctgggcactctgtctgaggctccagtgtccagccacctgctaacttctgtcattcagcctcaccctgggtgtttttgccacatggacaaatgtgatagacacaataaataaagtagatatatattcagaataaatattatatagcaagactaaaatataaatagcaagtgcaaaacaaattaaatgaggatatgaatgacttcagtgaagccactgagctaacaactacctttaaaactaaaacagtaagtaattgagaaatgcagttatcattgggcaagaagtcaaatgaaaaatacggtttgaaagtgaacagcatattttcagcattcctttaagttcacacagtacgtttgcacatggcacattatctaagctatgggagtctcaagtgcacggttaagtggacactgtgcagtgtgatttacgcaaggaaaaaaagacaaaaataatctttatgcagcgctgtcattgatttttaaaatgataaattggtgggtctggcacagagatcaatggagttgaagtcacgacgtcaaattgagatgtgaggttaaggctgagagacagacatctccttctctcatgctggcccgatgaactctccagtttttttggtgagctctggtgaaaactctttttaacccagaatgtcagcatttgggttataagaacattaatttatctgactgcagtgagatacattttctcaattctccttatttgcttcttttaccctaatactaggtcaccaaattcaaagacattctttctctaaaaactcaacttctacccaactgaattttcaccaaaggaatcgctgaggttgagtttggtggtaaagaacccaaccctttggtgcttttttcttttctaaacactgcatggccagacgtcagtactgttcagccctggaagccgtcttcctctttactgccttctcacggtgtttcctttaattcctgctacacaaaaagttacaagtggaaatggaagaaaacaattctttcccaatcaggattccctgagttggtagcaaaatcactggctaggtttgtgttagtagcctcattaaatatttattaagcacctgttatagatactactatgcttagtcatttaaggatttgcgctgtgaatcgcttcatccaatttcctcctatttcaaagtatttcttgtggacattctaggacgtaagagataatgaaaaacttattttttaaataatatttccagttgaaaattcacactcaaatatttaatagaaatcctatcttccccccccccccccccccgttcctgctggctcccagatttctgttgccattaaaatcccccaccgccttgctggccttgggtagcatctttaatcccttctttctatcttgccacattacaaagacttgtctgccagaaggttttactcatagctgccccctaacttacttcccagtgctactgagactggcacattctcatctgtgacaccttctcaactggtctccaactcctctcctctggtttgcctctagttataccgccttaatcttctgagaatatatgttcttgtttcaaacatcaacagaggaccctcttgccctgctggttcctcctcaaactgactccagactatgcctccactctctgattccagcacctcaacctttgctgaatgtcacttctcactcttcccatacaagtctgtagccctgagcaccctaccacttggcttaagctccaggactaatgtctgctgggctcaggagtgcaatctcaagcatcacccacgaagtgagccggggcatcactctctgcctgtaatctcctatcctgattctacctgggagtctttaggctcctgccacttccttgccacctcctcccctcctcctggacttgagcttcttggagtcctctcacttggtcttgtaacaccttacacattgccttggccactgctgcaacagctcagtacatatccacaaatcagaagtcctctctgaacaaagccatctgcatatccatctaccttccctatgcttgccccatttaaaaatcccaggttttatatctttgctgcattttttaaggatgctaaaatcacttactacaaaaataagcagatttcactgtacaaaatgcaggtagtaagaggtatctaaaatgtaaccactaagtacacatagaaaagatttttaaaaacatgaagaaggaccattgacaaatacaagatccttcctagagaagaacaagggtgggggatctcacatcaccagtggaatgacctagaaacacaaagactgctcaatttcattaaggttggcagtgaataggatatagccccatgctgcttcctcaactgaacagctgtaaaaaggccctcatgccatcagcctgtgctttttcctctttctctctgggatgtgcctgtccatggaacccctgctttgggatatagctgtgatcatctctgctgagatggagtgagagcaacttttatttgcaaggctgcctgtagtattttcagcattccgtagcctccttcccatgtctctcatatgttgtagtttactgcatttcatttcatggccaaagctagattattaagggctgaactggaattttccatattaagtagaatataaacttcaacaagcattttgatatggtggggttttcttttgtttctttaccattctattggatagaatagtataattcatatgaatgtatgctgtgcagagatgtaagactctcttcttttctttttttgctcaaacttcctaacagcaggatagtgtggtaaagagaacatgtctatggatgtgcaatactttgaataaacagttcagtgctctataaaataaatattcacaaataatgactttggggagagttatttccaaatccctttgaaatatgttgttagccaaaaggtttatagagtaatttagaatcataattcctgcttgtccctaatatctgctgttctacattcaagttaattttctctcagtcccaattagagctgggaatacatactcagcagaaagagacacatttgtcaggttagaatgttttgtttttattcaggtagtgatttgtcatctgataacatctttatacacctcaaagtccctcaacccattcattatggtttgaataatgtctaaagcacgtacgactcaaatgcacactgaatatcctgtgacttacagtagaggggtctctgaaaggacttgaatttggagccaggaaatgtctctgaagttatggtttttctcaatgtgagaggtaagatccttggttgcctggagataccttagttagtgccttcaggatctgaaacagacacattatcacacatggtccaaaggttcaaacctatcctttcatggcttagtgcttaacacaagacattgtccaaacaacttgtttacagcaatcctgtcagggtccctatagtttggttcctgcaagtctgtattctgtccttaatgtataagaacaatgtacattttaaataaactgattaaaagtcatgaagtttcactacatatatatcataggttagctccagtattggaataaagacttctctcaatgtttgtatgagaatttcatggtaatgaaagtgtcgtcatgtagtatcaatcatattaaattttgctttaaaatattgaagtcaccccataatgttatgaaatattaaaatcaaatatgtgagacaaaaaaggatctgcttcataaatcatgccagctaatttctggttggggaatgtaggtctccaaccagtggaatcatggtggggaggggttgtggtgcttcacatttatgaaagactgttgaaaatgacgatgacactggttttatctggggagtttttatgacctcacactcccagaatgacggtggtttgcctcaagtatgtagaatttgcctgccttcccaactgagcttcttggatgctatggacgcgttgaacagcatccttcacaagcgttaaaatccgtggtgaacctgtcactgccctcctacgtaaatatctgaccacagagctgctgctttgggaggtagctgtgatcatttctgtatcatgagtctctgagaagcataagtcacctgcttctcatattccagagttcagtagttgtctctaaatgagatagccatggctgggcgcaaacaagagaatacaaatgtctacgtgaacgggtctgtcctgccactccactgcgatccgttgttatttctgagaatcattttgatttttggactgcttatttcagtgtgtaggagtcttccttgtagatgaatgcctttcacgtacaagtctttctcttatttattgatttatttaaaaatttttccctacagagggagaaacaaaacacaaaaattccctttcctgccacaggggaaaacaactgtggcaaaacagagaagcccccgaagtaaacagagtaatagagtacccagcctcccatagagcttgcagaaatctcattgtgcagacatggagcttcccagcttttgccttgttagcctatttcttaaccagtaattctgtttcttaataggataaagggcctgacttacatgaaagctcaaagtcttaatcacaatgataaaatacaaagtcgtggcaactgtaataagtttaaagacatatgtagcttttcaaggacatcttgtctttaaggaaaagtctttcatttagctaaagaaattaaactgaattgtttagtcttttaaacaaaatgatgaatttagtgaagaaaacaaaactctccatggctaatgtaatttatgcaaaatcatgcaattagtgatagctgtgctagactttttcttttccttaaccaaatgcgcctctaataaaaccatcgtgaggagcagtgccatctaatgtaagtagtaaacatggatagtaaatgattaatatctggtgaggcatgcagatggcaggacttccattttttctttgagctccttgtgcatgtttgctaatcattcttgcaaaaaaattgcaaagataaatatgaactttcaaaagtaacattcaacaggatatgaatgtaagaaatagtacagtgtgggggaatagtaaaaaccagcactttccgcctctgcatagtgaaatgacggtaacttgctgtagcgtaagcttaataagggttatatcattttcatgtatgtactactctgggaatggcccgggtcttgtgagtggtattttttcatcaagtacccagccagcgcagtcactctgacagtccccccactgagataaggcatggaaaggtaaccctctagcaagtcctcgttgaggggggagcgttcaagtgcacagacgtctaccctgtgctatcctgagctgtagtcttctgaaatgatcgtttggcttcccagccaaggcagggctcccccaaagttcattcccactcttgcagtttcacctcgggatgcttccgcagaatttcagcgcctaagcagacaaggtcaaagtaaaccgcttcaccgctgcttctggcgcaggggcccagagcgcgtgcagctccccagcacagaccaacagcaggagaggggtccgggcgggagccctgggctgtagataagcaaaacgcacccattttctctcctatttactccagaggcacctctcctcccccactcctggcatctctttatcactggctccctctccctgtggcatatttttgggtagtagaatgctgaggtcacagggagcggctctttatccaagcagtggggacatcagcctggagccctgagcatgaaccagcaagatgcagactctcgctcttgactttgggctccaggagctgccccgaccccgggctgcccgcgggctccctcctccctcctgccctcgcccgccagctcgcagtctcttaggtctgcagcgttggttggtttcccacgcctgtcccggtctgactcgggctgccaggcaccgggaagccccgcggcgccgaccccaacccgcagccccgggaaggtgccaaccccagcgagtggaggagacgagcatttcacgtgggcatctgccttcactgctgctcgcgcctctcctcaacggccggcgtcagggcccctctgttccaactcatcccccccccgaagttaatcagccgtacttgtactttccagggcgctttagtttggaaaatacttaaaagcctcgaaaccttccggggagacggccgcccccagatctcccagttttgcctggctagggctgtcgggcgctcacgaagctgtggcgtctgtctggaacccacatcgcagaggcgcagccccgctcctccctgacgtcgccaaagttgccagacgcccctcagcgacccggtcgcgccagatgcagttgcataaccttgccccccacctgcgaccgcaccgggtccgctcccggctgcaccggggtgtcccggccccgggagccgccgagtttccggccaagccggtttggggccgagtgtgtgcgcccgaatcggggtcggcgcccgtcccagcggtgctctgcccgcggccaagtacgacgggcgcgggggcgcgggaggagggcacgcggggctccgcttaccttccgctgcttacagataagtcgaggtcgatgcagcgcctggctcgggcatgtctcgctgcggaccctggcaagcctggggcggcacggagcactccggacagggcatccgcggccagactcgccgcgctcacgcggaggaagcctcggctccggggacttggcccgctgcgcgcctgctgcccgccccctccaccgctgccggcccggccctgctggcccggccggcccccgcgccgcagctcgcgtcgctcgcgtccctccggccccgcttagcgacgcgcgcggggaggcagcggctgggccagctccggggacgcccgcgcgctcgcttgctcgcgacgcggcggagccagccacagccacccggcttcgcgctcctccgatgtcctcatttactgcaattgtcttcggcgagatctcagagccagggccaggaggcgggggcggggcagaggagggagcaggagggaagtcctttccgctgctccaggtcccagctactccgcggagccgggcggccagaggcgagggcgccccaagccgcgcgcctgccgcctgtgcgcccggctggcaccgaggcgggcggagccccgggccccgcggggcggaggtggggcgggggcggcgcggggccgggccgggccgggccgcgtgcgtggggtgggggatagggagggagtggaggagccccctcccgccgccgccagagctggaggaggaggaggaagaggaggaggaggtggaaggagctgccgccggctgccgccggctgccgcctgcgcgcggggctccgccacagcgcgtcctccgggtttctgggctgcaggcggcgctgcatggcccgggaacttgttgagtctaccctggagccgcctccggagcagctggcgggcgggggactccgtgtgttctctcagggatggggggtcgctggggaccctgctgcatgactgtctgctgtgccagccagcctggcccggcggggctttgggaagccaggcttgaagggtgcgtgtcttgtaggtgcctggccgctcacctgcggatgctgccttgtagaagcaggagttcggggatcctttcagtgctggctccaacctggtgtcagcctctctacatggggacaggaggtcctatgagtggcctgaggactgaagtgggagggcctgcctggtaatgttgcatgctgacatttagggacactccagagcaggcgccactgccactcctagccaggaaccctaccccccatccagagcacacaccacccgtcagcagaagccacagggcgcagaggctgagttcctttgtggcagagtagaattctcttgggagaggaaaagacctaggatgcacacggagctatccccgcccttaatttcccacccaccaaagagtattgggtgttttgagctcagagcagcagacccaggggcccctctgatgcctgtcaggccctggggtctgggccagggactaagcagccagccgagtgcagggctcctggccccctggatttgctcctagaatgtaatgtaaaatgtaagtagccacatttattagtctgtttctcaggaaaggtcagagaagtagtggaccccagggaagggacaggcttcggagaggaaattgggaggacaaatggaaagtcccttcacccacccacctctccagacacatcagtgggcagtgagacctctttgcctatacatccctgagtctctgcacctagcaccagctctgtgcctgtgaccaagccatagctccatccttgttcgctgagctgaactgagcctatcactgccttatagagtgtctgttttttataaatgactttatacgaaataccttctttgtatgtggatgctttgggcagtgtgtccagacatttcagaagaaaaaaaaatctaaaatgtcatctatttccctctttaccccgcagcatcctttggtatacaattttgccagccttggggatccagatatgcccaggacgggagtcctgagcctgtggatccaaactctgcccacctcactcttcttgttgttcttcttaactcagatcccccaagctgattttccagcttaccagggaggctgttgggagctggctggaaagagatgcttaattttgtgtgagcagtatggaaactgcagtcccctcttctgcctggaaggggcctgggaagggaatgtataggagttggggacgtttaaaaccagataggagaagttgccactctccagcatgttcccttggggatgtgctgttgcagctgtgggctccagtaattttcccagtggtctggggaacttctgtaaatcttactttattggcaatccataaaattgaaatctgccttccgtcttttaaagtgactgtaaataaagctgccaggaaacttgggcattgggctggtagtatcagaaggctgaagttttccgggaccaagagtgaaaacaggtcaacataaatgcatgcccagcaaggcagtgctcagccacaggtggcactgtgaactggcaagaaaacagctccaaggacagtgctatctgagattcgcatgatgtataactccaggaagaaaatggaaagccgtaattggcaggttagaaaatccacttacatgaagaggagagtataacggaattctgtagcatcatcaggactgcttagagttgttcaattgtgtagtagacttacagttgttttgctaagtctattaaaatcattggcatcgcttcttttttttttttttgaagtaggaaaccatttacatattgtagtgcttaagtgcatgtcttcagcatcacaaatcaaaatattggtgaaaacttgcctcaccttacctttggctctggagagatattccacatgggtgaggtgtgtgtcatcatgctccaggctttaaagcaagcatcatgctgggggctggctggagagaagggagtttcagccatcttcctgcccacagatccctcttgcatttttttttaatagatgggatgtaggcatatttttagggtctagaatgagtcaatatgctcggcttcctcaggaaaaaaaaaaagtgaaacttgatagattcattttaggaatcaattggtattggctttttatattttgcttaagatttttgttgaaaaagatagacttgcaaaggagaaaatagctacttttcaagtgggatttcctaaaagcagaggaataaaaataagggaaagttcaagacggctaactaagcaaaatatccacgtctctcttcttttgccttcttcttggaattgtgcaggggttgtacagagaattgctggaattccacccctatggtatagtgagtttgaggtctcaatttccacattaaaaagtcaagaatatacaagtcaaacatgttcaagaatgttcataacaggtttatctatatctgttccaaacgggaaataatccaaataccagtcaacagtagataaagatttcttggttcttcgtatagtggaatactagacagcaacccaaaagcactaactgctgatgcatgctttggcatggagggcttctacaaaggtgcagaacaaaggaagccagacgcccagtgtttatgacatgattccctttagatgaagtccaagaatgcgacaaagttatcaatggtggaaaatatcagaatggggattacctttgaggcatactcgttgcccgggaccacagcaacttcactggtgctggatcattctgtctcctgcactagttgcttatgcagttttccacctatatagaaattcatggagatgcttcctgtctcagtgtgacctcatttgtctgagcatcatcactgtgtcattgcaatgtccacatgcatgctccccaataacccttacccctcagtgaaccagtgtatctgtcagtgtgattaacctgtatcctctccagtgtgcaaggcaggagaagagaaaagtgtctccaaactagcaactgcagaagaggagccttccagtttagctacacagcagaacttccttctttaggagactgccgatgaaacgcctgccctcccaactgtccgatgtcgctgtgacagagctcgctatggacgtgaatttttctttcccatgtctttgttacacaaaagcggtcccgatccagatcccaagagagggttcccggatctcacacaagaaagaacacagggcgagtccactgtgcaaagtgaaaacaagtttattaagagaataaagtagtgaaagaacagctactccatagacagagtgggacattcccaaaagtaagaggaggaatgcgtccagcctaggtacaatactcatatatatggggagctctgctctgctacgagggtttgtgataaaggattaaatttcttaattattatattttgcaagaatcgatattatctgttttcgtttttgtttttgtttttgttttggagacagagtttcgttttgttgcccaggctagagtggcgtgatgtcagtttactgcaacctccatctcccatgttcaagcaattctcgtgcctcagcctcctgagtaacctgtaaccacgcctggctgattttttgtattttagtagaaatgaggtttcaccatgttgcccaggctggtctccaactcctcagctcaggcaatccacccatctcagcctcccaaagtgctaagattacaggcgtgagccactgcgcccgatattattatctttaaagtaaaattaggaacgcctttgttctcaggatgtctggatattaggacactcccaagtctgggtctgtttagtaaacatcaccagtgtgttcccttaaccttaaacatctagaggtgaggaatgcctaactttctaagaatgcagcccagtaagtctcagcctcatttctctagtcctcactcaaaatggagtcgctgtggttcggatgcctctgacatctgcatattccaaagagactcatagatgagcccaacctaagtctgtgatgggcaggttacacccgtcagttcagaagctgtggtagcagatcagccagtgctcaacgcctacgagggaaaagtaactcatatcgccttcgacctgtagggtcgagatcattcccttggggacactttagccttgtctttcaagaacaagacagacacaatcctcaaggtgccccagtggggcctccttttctgccgagaagccctgcaggaaggctttctgcatcattccccttgtcatattctgctcgagccttcactctcctctttctgggcttatttctggtttaagactctcgctttgtgtaaagccccttgcccgtggctcttgcacggtcctggcagccgagccgtgtttccttctggtgggaaccagagctgtttctgaggtgctggtccatgttccagggccatgccactcctctggctttcttttcctttcatggtaagaaactagagatggtttattggcctgaaatacaaatttgttttggaaaacctgagcatcgtgaggactcgttgagatccctggctttctatgatgcatcattgtgaatctgatttatccacagaaatggaaggttttccttttgaaagagagggaagtagctctaggtttttgtttttttctaatgctccctgcaactgaggcagtgatgtatgggaataaggaagagcaggcgtgcactctggctctcccctctcccctcacaatccctcattttcagggctctgagcaaaccccaaggctttcccctcccaactgcagcctctcctttcttttaggcggactcctggggaatgaaacagaaaccctttattttgttgacctttatttggtcagtcttgggtgctggtttctatagggtttcttactatcccattctcgtcactggggagccaacctcttcagcacaggtagatggctcaatgggcttgtcttaatccttgctggtaaggccaccagtctcattgagcctgctgaagccaccttctcataaagtggctgacatgcccacagagagtgacacttctgatcagaactagggcaggaaggagccaggcacggtggcttatgcctgtaatccgagcattttgggaggccaaggcgggcagattgcttgagctcaggagttcgagaccagcctggccactatggtgaaagcttgtctctactaaaaataggaaaattagccaggcatagtggctcatgactgtaatcccagctagtcggtaagctgaggcagtagaatcacttgaacctgggaggtgaaggttgcagtgagccaagatcgcgccatggcattccagcctgggtgacagagcgagactctgtctccaaaaaaaaaaaaagaactaggacaggaaggggtaagaatggatttcacacttgagtttccacccaccagcgctgtgtgctggtgctggagctactggctgcccttcccaggccttctgccccggtgcacaggaggcttttctttagggagctgctgcagggaggcctgcagtcttctcccagctggggggtgtaggaacttccttgtttgccctccatccccaccttaggttccacaggcatggaagagggatggggtaaaggggaaggcaaggaacatggaagcctccttgttgtacttttttccttccccaagccctgactgaatatgagacttcgatgagaatgatgctccgcttcggttgtgcgcctccagggtggcaggtactcggtccattgtggattatatactttggttcttaccagataactgggcactcaatactgttaaactgtctccacagatgtggatcagagaacgtaaatgatctctccaaggtcacacagctaggaaggggtggagcctggattcaaatccagttctgtctgatgcaaccagaggacagattctgaccaaaaatgccaactgctcatgccaggctctcaggaagctgatgctgcgtccaggctggctggagagtagctttgaccagcattcttttgtcgtcattagccgtccctcattatctcactgtattagttacactttgaaataaaaacaggcactgaaacagcaatatactcaaatcattttgcatttcgatagcactctaagcttccccaatataatttcagtgatattctcacgttttcttcgttgaataacagctattaaaatgattcatcacaatatacgtatcccatctataccacaagaggccacttcacacccttctggtgccatgtataatggcatcgtattaccatggccttttgattatcttgaacacctctttggtgctgtcatttgctgagattcagtcatagtggacaggatatgtgtttttattttttttaaagatgactaacacactgtgcatataattctaattacctacccttgacattttatgcgcttagtgcaataaattattttgctagtttggtctaagaattgacgacctgactttagatgtatttatttcgcagcgtggctcatgggtgatgtgataacaagctatgaaacattggaaagcaagcattttattctttaacaccaagttccaaatgggaaaagtacagaattaaaaataaaaaaatctctagttatgtttgatgacctctgagttcctggaactgtcagttccatgttttccgtaaacgttttttttttttttttcatattattgagtctttggagaattaaacagtcttcgctttaattgcactgcacggtagggctgcggatctccccgtgtccaattcacctaatttgtgttttggcacattctgcagctgtgccatactctaaatgtgtgtgcacccctcacttcggggttctcatatattagtccactaactaaagttaaagtaaaaaatcaaaaacttattttaagacatttcttacacaattttgattttttttttttttgagattcaaagaaaggcagggaatttggcttgtaaatgttgcttaatgtttttttctctttttagaaactccagtgtccatagtttaaagtgaatatggctagaatgttgtacaaacgctcctggcttcatccacatccctgtatctcggcagtcacagctccctggcaccttctcccccttgcctggacggaggcttctgagtgatctcctaggccttcctagattgagaggggaaagggaagatcttaagattccagaatattcatttcatttaagcgagggaggcaaatcctacagagctttttcccatttgtgttcatttattggctgtttccgtggattcgagaaagaaacttgaaaatctgttttgttttgtttggtttggttttgagatggagtctcactctgtcacccaggctggagtgcagtgatgtgatgttggctcactgcaacctctgcctgccaggttcaagcaattctcctgcctcagcctcctgagtagctgggattacaggcatgcaccaccacacccagctaatctttgtatttttagtggacttagggtttcaccatgttggccaggctggtctcgaactcctgacctcaagcaatccacctgcctcagtctcccaaagtgctgggatcactggcgtgagccaccgtgcctgaccgtttttttaaaaaaaaatagagatgggcgtttggaaactgagtcactcaaaaggtgaagtagctttgtcccacagatctgttactcagtacaaagttgaaaggaaacctaaattcattttatttgtgtttccagtgtgcatcccagacatttgtttcagaatttgttaaacattgaagaagatcacctagggttgagtaggtaagaagtaaatgtggctttgagaggccgtgatagccgataccctcaatggctgctcttggcctgttggacaagccatccttgcacatgacttgctatcctatgacccgcctccagatcagtcaccctccccatttgactgtgggtggcctggctctgtttgatgaccatgagcaataaagttaccctttcattaccatgccttgggctatctgagctggatgcccctaagttctaatagaaaataacatttattgatggttttttttttcttctctgaacccaaatatgacaatgaggaaatttattttaaaggtactgattttttccttccccacagagtaaatattgtcacatggaactgctgatgatacttctgagtcccttaaaataagacttgtgattcattcacaccatgaaaatggtagagaaccaacatcttcaccttcagattcatacgttattggctctttcctttttggtccgtgggtgttaatgaacattttcactctggagctttctctgcttccgactccagcgtggatgaaggagtgcagcttctggcctgcctggttcatcctctgggtctctcagccctgggatttccacgttccatctctgttgtggtgggcgagttgcatgatgcattcgatttgatattttacagaacctctactgagaaaatagggtaagcagattaaagctgaactcagacacgtgtttggcaaccacccactcttgatggcgtaagtggatggaggcaggtggccacagcaaacaccatgtggctttacgaagaaatgttcctcttccatacgttaggcctgtgtaaagttccttgttggacttttgcttcttcgatgacaatacatattttgttagtatttaaaggacatttttaaacattgctgaagtgcaatcagcttaaattgcgattcatatgacaagtgttgaaacagggtgatgtttgccatgaaatttaaataagctccgttaaagcagaaatgtctatataccatgtaagacacaatggtctcccatagccttcccctgttctttacttcttgacaagcatgaatagtctctctgtttgaatacagagtagagtcagttattttaaaagagttatcatctatgggtataatgcactttaagcaaactctttacatgcaagtatgacttatcaacaagtaaaccttaccaaataaatgctcattttgattaaggctaccttcagataaccactgtttatcatgcacttagagggattcagttttccaaaataatttaaaaggtgactttttagaacatcatctattacattgtcatctaccatatattcttcttctctttttttttttttttttttttttttgtgacagagtctcactctgttgcccaggctatagtgcagtggtgcaagctcagctcactgcaacctccacctcccaaactcaagcaattctggtgcctcagcctcccgagtagctggaattacaggcacccgccaccatgcccagctaatttttgtatttttagtagagacagggttttgccatgttggccaggctggtctcaaactcgtgacctcaagtgatctgcccacctcggcctcccaaagtgctgggattaaaggcgtgagccaccgcgcccggcctactgtatattcttatatatacatgtgtataagaatatgcatttacttaatacgctatcaatgtacagaattgtttgttgtggatttctgcacatgttccttgggtaagagagtcttgatgtgatttgcgctgtgagagcagaacttaggtgctctatgttctccaaagtccccctccacctcctggatggcatttattcagtagaatccgagctcaataaataaagaacctcgtgtacttcccaaagagccagacactgtgttagctgctttatacatacatctcttaattttcattttttgacaacattatgaactatgaaatattgataggacatgaaaaatcaagagctggtcttacggaatagtgcaggattccttccctgctccatttttcaaagctttgctccattggaacttaacaatgtgctgtctttcagtacgtctgaaggtctttttcaatttaaatcagtttattcctgtttttaccatatccagctccctgctactcctaatataaacagacttagtggcctattaagtattttacttctaatgcttttgagttttttcttggcagtggaggtgtaatctctcccaaaacctgcctgcacttcacagagaataggaccgcaattgccagaagaaactgaacctttatgggggaaaaagaaaaatacagccttccctcattctccagtcttaattgagctaactcaatttatgccaaccagttcttgctggtcatagttctagagctttatgagaattaaatcctgatctcaccttaatcctcctaaaatctccgtgaaactgggcactgttatcagcaccattgtgaaatgaggcagcaagtacagggcggtccctaaatgtgactaagtcaggaatcttatgtagaaagcttacaaggaagttggggggtgattaggaattgtctccagaaataccagataaacagttcaaattttagtgaagcaaaagataggcatattttggccttgtttaacttgtacctgaatgtaccaataacacttttggaagacttggacgtactcttcctcttttcccaggaaaatgggagagtattcattcctgtacatattgagaacatggacaattctcacattttaggattgtcttaataggcaactgactttattatctacgtgttgattgaaagaatagctcatagcaggtgttaaaagtttttcctaaagagctacattataaatattttggactttgaaggccataacatcgtaacatttcaaaggtcatgaaaacccagctctgctggtgaagcagggaagcagctgtagagaatatgtagacaaatgggcaactactgagttccaacaaaactttatttacaaaaccaggaggtgggccagatttggtccacaggctatagttttatgacccctggcttatagcataagttgttggacagaattttgataccatatgtagacccaaattttaagaatgaattgatgcgtttgattgatcacaggagaattcagtgtttttcccctttgcttcttacatacgctagattgtaggctcacccggcctcctctgcgatttgggcagaattagagcagtatatcctatcaagaattacttctggcaggggatatggtgaaggggccattcatctgttagtatttgagtaagaaacagttccatacaaacaattgggaatagtaatgtctttgtcattgtgaaacggaagaattttgctgtcttagttatgggaatgctccagttatgggaactaaagtgcagtaattgctttaaatggacggtcatatatgtttggctccttagtccaataattttattcaccacgttcccctgagagaagacttgacaagacaatcctggacagtcagcattggattttcatctccagctgattgatttagtatttcatgcaacccaatggagtatctttgctgtagggttttaatactggagctattatgatgactgatgtaatttagtttcctgtattgatggtttccaaacaattgagatgaatagttaagtttctataattgttctctgtaaccatatgaaaaatgattatatattagcttaacatgagttttttcactaaaataaaaatcaataatcagttggttatccttttgaatattatatttaatgcctcagatttgaatattatcaggaagccaagatttcaagaccccgtttcatttttttaaaaacatgacaaaatgtgacatagtgaacattgagatcactgagcttcattgtggattagcaccccactttcaaatttgtcaacacgatatcatctgttagatgatatctaacgttgagatgttctctaagataataacgttgagatattctctaaagacctaggataaagttctaatttaatttcctattgcagtatttttgtgttgcctgtcattaagactgtggagcttccttattaattaaatttagttcactgtgtatattgctaccacttaccaagtggtcgttaatacagcctctcttaggtgatggctttttgtttacctagcgatgaaaagcttaacctacactgcatttttttcatgtgtgtttaaccgaaggaaacatctttgaatttatcttctcactgcataactggaaacactgaaatttatttgatgatccagaatcagttccttggtttttaactttatttccatccacaacaagtggcagctttgagaaggtttcagttctttacactgagattccagtggatgagtctgaatgtttaactcccagaagttaggagaagattgagcttgcttttggagtttaagaatgaaaatgcaagtgcatgtgcctattttagggcctaagttggattttcataaaataaagcaaaatctgaggtcaccctgtgtgggaaaacctcatccgagactggagattgaaaataggagcaagggccagaagtagccgcctggagagcagagctaaggactgggtggtgcctgtgtgtcctttgggcacctggtgactttcaggacatcatagacgcaagggtgagggcccatctcatccttactgtcagaggcaacagtacagccctggggtgtatttcacattataccactagagctgggtgcttaaagggcatcatcaaatccatttttcttaccttgagtggaggtgcctttcatttgtaaatgatggatttgaaaaacggacaagtagtgaaaatgcaggaaaatgattcacatcagtaggtgctccagcagatgtggagtaaaaatcaacatgtcccacaaatgggcaattaaaggttacacatagaatttatggaaagaactttggagtgtcccagggattgcaaaggtggttataaatgcatgtgctcacctcttcctgttagcacacacacctaaatacgcagaatctctcagcagagacattccgttgagagcctacttaataaacctcattttaattttattcaccttagtaaggctgcaggagttggtaagtcccgtggacttggagacttaggttaaggaattccaaacttgactgctaggctgctggtacaaatcatctttctctctttctagtcacctggatacattatgatgcgatgccagacttccccaaaaccccaatcaagaaataagaaaagatttttctccatttcctggttccctcacagtgagaatgagattttttatgaagtcttacatttggtggttattggcccattacctatggaaaccactgtaaagacctcacagtgctgccatcagcatgcgctctggacttcggcggtgccacataaggtggccccagtgctcatcccaggaagaatggcccctgcttgtctcggcaaatgactcccacggaagctgtggagagccacgaaggtggcaggcggcattagaggggctgtaaagggaccgatgcctgagaatttcttctgcaggatgtagaaccgtgtgcatttggatgataatgcagtcagaggagggcttcctgtgattacggtggaataactctcaggctgagcccgggaaaccaggaaatgcacgtctaccaggagccgaagcagaggggtttctttttccctcttgctctgtctcgttgaaccttggttcttctatctgtccctgagtcctgcctctgagccactgcctgttccctgggtggctccagccatggactgcatgggtgccaggcacatagctggtgactctgcccctctggtgagtgcagcatggcctctgctctctccccctgcctctttttgttttccttttctgagggttcctcagcctcatgaagtttaaagcctaatgcagatcctctccctccgctgcattgttctaggtgtcactgaatttctccaaagagaaaaataaaaactcagaatattcttgtgactgatttctgaatgtgacacgtggcgtaatgacttaaacgtattacagccagcagctcttggtataggacccatgatattttattatattttgtttagcattttgttgtactttattattttattgtctttgttttatttagaacactttatatccacccttttcacagagttttaaatgtacgttacggtactgttaactctgggtacgatgttgtgcagcagatgtctagaacttactcatcttgtggaagtgaaactgtacaattgtgtctgtgatccttcttaaagccttagctgggctgctgagtcctgcactctaactgcaggaagggcagctaaggaaagccaagtgcaacttgccagacagatgggattttcatgtctcatctatcaggcaagacattgtctcagtgtactcagcagactcctagactcgggttctgggctgatgctgtcagacatcataaaaggagagacactcctctcagccatgctcctaatacccctgataagcatgctcctaattcatctactgcccttagcaaagctgccgtttgtgtctccgatttggtgtctttatagacatcgccatcccctgttagtgaatttggggtcttgagacgtcatctgatgaggacctgctgtttcacagaggaaatataactgtctgtgtgctttttattattgtcatgtttgctgctgacatttcacagctttcatttattgaattttgaagacattgattttttcttcatagcagaaattatggatcagataattggccaaataagaaaaattcagacagcattgtttttctaaacatactgaaaataacgcatgtacctggtgaaaagtgaagacgtcatgacagagggtccagccctgctgtccaggccacccccaggatgggagccctgaatcctcatgggatgtgcgctgagatacaaggaggtccctgcacacacctgcctttccccgctgctggactcttgcaaatcatttcctgtgagtgtcagccagcccactgcatgttccgaaagctctgcagagtgcgccaatattccagagtttcaaagtagtgccctttgaaaagatttaaacctgcaaataaaattaaatttgcatttgagaatacaatgtgttttccttcttgaaggacttgatgctttggtgaataagcatatattacaaaattattcaatcacccatcacaagtgggtgtgtcattccagctctgtgcatcctttcaatgactccgaggatgatatcctcacggaagcagagttatttaaccccagttcactgatttctcagagttgtttacaaggcggctttccgtgatgtgtctgcttgggtaaggcattaaattatttcaagaatcattttggtctttgctctcaagtaaaagtggttttagaaggaaacttctacctggccatcgtgtgacaacactggctgcatatcaagaaaagtgagactttattttttgcacatgattttatactcatgtatgcttgaaggaatatgcaagcgtcgtgagatctaatccatacagaagttgagaatgtgtttccattagaaggtaaagagcctctagtattcaaagcctttgattcagcgggcaggtgcgaacggtggaggactgtgcttctcgcttgcagacacctcgaattatttttctttagctccctctgtgctttcagggagcctgcgtgagttaagcctctccttgtagtgatttcccgatgcccagcaaggccgaagctctcatttcctttaggagtgttgttttttttttctcaatgaaggatgaattttctaaatccataattacacctgaccatgatggcagcttctctgttaagggcttggaaagtaccttgttaattacttgacttattttgtcaacattttttcatgttctccccaccccttgccaaaaaaaaaaaaaaaaggatggagaatctcatttttgcttcagcgtctcttctgtgatgatttcttgcttttcaattcacgtttggaaaaatgttttcatttaaacaacctccctatttaaaaaatttaacagtaatacctgctttttgtaatgagtgaagataatacaataaggatgtatgaagtcaaagctaattaatcattcttctcccccatcccctttctatccatcccctttagattactcagtaatgtcgacagcttgctgtatgtctttagacaccttacttcttgtttgtgtgtacccatgaaagcttttatatgcatagatatttcttttacatgtatttcaaaaagctcagaatattgttgggaagggaagagagagaaaaatgttttctttgatttttaagacagtacttggaagttaagtgtgggcatcagtgtaagtaagaagtaggatgctagagacagaaagaacaagatgggtagtttttctttttattcaaagcaatcagtgatatgttctaatgctttggaaaggttctatgcctagaatgttcccaagaaaggtctgatttattcttcataaagtacttttgtgtacttctgagctagggtggaatttacatggtttggaatcatttttgggggtgtttttcaaaatgtttgattggaatagtgataagttctctttaaagagattgatcacgtgagattgggtaacaccaagatgaacagaatgaaaaatgtttccctatagcagtgctttcagaaacgtgaatacattaatgtacaccaagcatttgtagaagagggattagggctcagcattacagtgttttcctaactttccttactcacaggctccttatttatttattttttgttaggctgccgtggccagcgttccaggaaacacactttgggaaatgacgctcctttggctgtgtagcgcacaaggggctgtgagcttcccctgtagacgtttctgccttattccagctgatcagtaatattcatcagcatcatttcattcttttttttaagacggagtcttgctctgtcgcccaggctggagtgcagtggcgccatctcagctcactgcaagctccgcctctggggttcacgccattctcctgcctcagcctctcaagtagctgggactacaggcacccgccaccatgcctggctaatttttttgtattttttttctttagcagagacaaggtttcactatgttagccaggatggtctcaatcacctgaccttgtgatccactcgcctcggcgtcccaaagtgctggggttacaggtgtgagccactgcacccgacctttttttcacttttaaatcaaaacagatcattcatacaagagaagaaatacatatgtagagatgacaaatcattcagtgggcctctctgtaatgcttcccgctccagtccctgagtagctccccccgcccagctgtgcacgtcttcttctttgtgatgtggtctctacacagatttgggattcattttccctcgcttctctttttagttttaccacatattaatgtatccttaaacaatatgttcttaagccttgcttccttttgccgtttatagaagcagagtcaaacaatatatatttttccatgacatgcttttagctttcagcactgtggttttgcagtctctccaggttgatgggtgcagctgtggtccattcgttttcttagctgaataatactcctgttgtaggaatagatggcagcaagcgtaacccctcttcatggatgggtacctgggtgatgccagtgtttgctattaggacagcgtgttagatcctgcatttagcgatctccaggcacacctgcgggagagcgcctccaggaaacacaccccggggtaggattgccaggccaacaggtccttaaggcagatgattaccttagggaaacagaggcccccagtgtttcttaggcttcagaagtgtggtctacacagcaatagtaatatgaagactcagctaccgtgattccttctcagccactcctcctcttgtcctaacccagaatcatatttatgatattgtcattttaaacatatgcgtgtagtttctatgtgatggaatatggtagtgagaatctaagtatccagcctggtcacccgctcctttccgcctcacgtgcaggatggttgccctcatttaatcatcgtgtacagtctccctcgggcaccctgagccctgcatctgtttcacccagggcctccctttggttctcgttttgttctttgcctcttccaggactcctgcctcccttcctgcctcgctatcagccttctttagaatacatccccagccacgttccacacccaatggacagcttgtgtaatcatgttctcccacatccctaggagtcctgggatccatgagtggctgtttgtaaatctcaggaagctttccctgtcttcctgccctgccctgtcttccttcccctggtccactggcctcgggtttcctgcagcatccatggagcactagggaagacccagccacgcagctccatgtgatccctctgtggtccgcctggtgctactactgaaaggagggtctctgttacttggcgccaagcatggcaggtccagttcccacggatagccggggcatctaaccaagataatttagagcagaagctgtagctacattctgtacctgtttatcttgagttcctgctagcaggtaccaataatgatggattgtgaacaaacagctctgccttgtttttttagaccctgaaatagacagattggctttgataatgctttttgactgatgggcactttttgtaactaaatcccattcaaaggcttaaaatatgccgcccaaggttgatttcaagatatattaaattgacctaaagaaaaataagtaggaaaaaaagtcctacctacatatgggatgatgtatggacattttcaaaatagtcacaacccaactttaccatagcaaaaacaagcaaacaacaccccccctcaccccccagaaaacaacaaaagcaaaaacatcaaaataatccctgcagtgaaacaagatttcccctttattactaagtaccttcagccaaaaggaactgcaccacttcatttaaatgtggttctgaatattcgtttgtgtttgcattgctggattatctaactgctgctttccatctgaaacgtaagccttcagagatgttgctccccagtaaactatcttagctttgccaggaccgggccttcactgagtgtaatagaatccctgatccccaggaggtagggaaggggctgacaatgacatgcatgaatgagaatgttttctagagaggatgtagtctgccacgtcctggagctgctttagggagagcaaaaacctgtttgtatctttcattatatatgcttttaagtacccaagttaggaagtagctatctgtgagcttttctaccagtcttcatgccaaagtgataatttagtaaaaaaaaaaaaaaaagaaaaagaacaaacaagccctcgaaaccaacctgaaagcgcaggatacagatacttatgggcagagagagactattgcctgtctttggaagcattgccagctattgctgggaagaccactcctgcttagaggggtggaattctttctgagctagcttgtcctggaagtctccgccccaagagtgttcttgatgcgtgtgccttacagccattgggctgggcaacctcacctttccattggctggaaaatgaagaggataaaccccactctcatatgtaggcaaaaggttccttttgataaagtcgtgatttctccatctcaataataatagtaatgcacccatcccaaccgccccagagctttgctgttcaggaaacataggcatatctcaaagtaccctttaccttaattttcaaaatcagtgccttgtctcatgacttttcaaggttggtgaagttctgaagtacttaaaaaaaattgctgatttaataaacttgctagttgaataaaagagtcagaccaagtagaaagtcgttttaccacagatgtgactttttctttttgtggtgagtacatgtcgtgggcagtgcatggggcctgtcacaactggcatcatttccatttggttgaaatccgagcctctgcatcctgccttgagatcagggcagagcccttgctttttagtttcatggaggctacattataacagagaggaagagagggagagggaaggaaaggaggagaaagaaagagaaaagaagggaaggggcacaggcaggaaaagaataggaacattccaaagccatgtctcaggacattagagctagaaccagtgtctgtgctaatgggactcttgcaaacaccctcttatttcactttacctggggttagtttttggtttcctgctttaacagatgaaaacaggttttttaattggattctgcacattacccctgtgaaactgcagaacataagcggtttaagtagtttcacactgggctttatttcattagtgatatgctgtatggattgtaattctcataaactgataatatgctgatttactggaaaccaaattgacaagaagcctatcatgtgtattggcagtctgttcagcttgctggacttggccaggagaccttgagctcctaagattttttcatccttctcttaaaaaatagcaaaaacatatctttattttcagttattaaattttgagttcacttaacagtttcttatctgtttgcagaaccacatggaagtaatgataaagtcttgtttcagatatataaggccaacatactaaaaatctgagcatattcaaatatgcttctgcatcttgaagaataaggttgtctatatgctagtaacatttatctgaaaaacatgccacatagaaatacctttatggggacttggccataaattctttgccaaagccaatgtcaagaagggtattaactaggttttcttctaggattttaatagtttgaggtgttaacatttaaatctttaatccaactcaagttaatttttttcatatcacggaagttaaagggccagttttatttttatgcatatgttaagccagttatcccagaaccatttattgaaaaggagtcctttccccattgcttttttcttttttttttctcagccttgttgaggatcagatggttgtaggagtgcagctttatttctgagttttccattctattctgctgttctaaatatctgataaaataaaagttgaaatttttaaaaaagtatctttatgaaatctaaaaattgtggaaagtaattaatctcattaatctaagagaatccttgttaatgtatttgaatacagatatttatagaaatacaactataatttgacctaatatgcagtagtatacatgagacttaacaattgaaattgttgttttatctaaacagaatctgctcatttcctttttacaccagcaatggtagagccagagaactttggttcacaatggaatcatcaagtcataaaacttttgaacttcaagggatttttccatttttttttggttggaggtggtgatagggaaatcttcttcaatgacaataagttaatgacttgcattacttcttggccaaagttaagactagaacagaagttttccgactcccagtctgttcagtattttccccatcatacctgtgattatcaaccttttctcactctgccaaccaaaaatgttcccttggaatgacttctgactgtttgtgctgaaatgaagcagtggtttttcaaagctcacacatgaccgtatggactctgcacagttggtgccatattaaaatacaatgtctcttacctttttttccctccactttctgttgttatttcccaatcaaagtaaaaccagtattaaggtctgtcttagttcactttgtgatgttataacaaaattacctgagactggtcatttataaagaacaaaaatttgtttctcgtggttctggtggctgggaagtccaaaatcaaggcaccagcaagtttggtcgtctggtgaggtctgctctctacttccaagatggcgccttgttgcttcatcctctggaggggagaaagctgtgtcccctcctggtgggatggaaagggaagccaacctagggctaagtgaaacctcttttttaagggccttaatcccacctcttaaaggatgcacttcttaatactatcacactggcactggcaattttggagggggcacattcaaactgtagcaaggactaacttctagcatattgtttatttaattccccaaattaagtagtggggactgcagattagttctgaagttttcctttcaggagaaagtagaataaatgggtaaagaagaaaccataaattcatcttgggtggaagtgcagtttctgaatatattctacacatcccaacaattgtgaatgtgctttgccatcttatcaaagcagtattatattatagaaggaaaggctttggttgagcatatggctatttctgagttacttagctttatattaactttctcatcagcagttggcctacttgcttaggccaattagtccttggccattttgtctatgtgggcatgctaggtcatgtcagggctgattttttcttctcaaaaatttttaattgtggtaaaatatatatcacatagaatttatcacctttgccattttaagtgtacagttcaatattgtgaagaacattcacatttgtgcatgactaaattccagaactctttttatgttataagactaaaactctctacccattaaataacaacaccccatttctccctcctctcagcacctgtagaaccaccattctacttcctgtctctatgagtttggttactctaggttattgggccaattttgacagcctttcttgaggtggaatcctcttcccaacatacttatttccattgccaaccatgaccctgcccatggagctctatcctacactctatcccatccccgtcttcagcccatcctgtttggtgacacccaccatggccccagcccacatcttcagcaggtgcagaatgtctcttagtgttgacttacaccctggcagtcctgtgcaccattcacaggatagtcttacttacagattgagaatctacagttttgagatcattatctttacatttctgtatcctccatccttcacagagtcttcagcacagagcatgagttcaaaatcaatgctgggagcattaggagaaaattacagagaaaaaaatgttcaaagatttcatgtagttaaacattcattccttccacttttgcatcctagattgacccctcttgtgtcttcctagataaatgggaagttgtctgtctcagttgatgtgatatttaaatataccagagtttggagtttgcagagaaagagtgtggagaagctaagtagggaaacttgatgagtccctagactgaggatacaggagaatgaagaggaggcaggagtggggaggaaggaacagagaaccaggaggcccagggacgtgtgtgttgcagcagctttgagtgtgaatgggcaagaatgaactgcacgtggggctgccacatttaacaaataaaaatataagatatgcagtcaaattttaatttcaggtaaaaaaaaaacttaagtctatccatgcaatatttaggatatacttacactagaaaaaatgttgcttatctgaaattccaattttactgagtgtcctggattttgtcttgcaaccctagctgtaaagggaagaaggagctttgtggggtagagccaagcattggacaaaggcatggatggaggagcgatcggtgtccccagtccagttcagtaatatggagggcggagggtggagattacaagaattacaagcaaagatgggggccgtagaattccatcttctacctttaaagaatttgcccttttttttttccctttaattgatttttccctctgtttttaagttgttctcttttgaatactctgcttatagatttatttcctaaacaagtgctgttaaatggcctccacttcacaggctccatggaggagcagagctctcctctctctatgccgatgctttcagcatcctcagaatagcagctggaaggcagtaggttttatggggataactgtgcactcaccagtttagatgtgtggttgctaagagtcacggtatttgtttgcaaacctgttggtaccattggtccatgtttagctttgtttaatatacataaacaaaaaagtgtaactggaagctatggtattttatttttcaattagctatggaaagtacaagaaaatcaagttgctaagcaatttctgttgaattggatgtgggtggaaccattatcaaaggttggaagaaatcgtaaaaatggaggagcattttatattcacgttgtttttcctatgtcttcaagttctttaaaggaactgaaactggaaattgcagaaaatgcattatgggtgtgatttatgaggtaaagaagagtacacagtgcatggtgtgttgttatggcaaccctaggaaactaacatcaagatcttaactcaagatattgatcctcatgtatgttaacgtgagagacatgtgtgtcttgtgtggagggcctctccaggtgagagggtggctgtgctttcactcatggtcagctccagtctgctcagggagctctgggcatccatgtgcccatgtgtcatccttgtgacatcccttcagtgtcagctacttttatcctttgatcaattgctccagggctcataatacatgatgtaattggttggaaacgtggatgtccaaaaagtgcatcaacgctcaaggtcatgtgtcctttgttttgaggtgtcactctgggcagagctgtccggtgcaactcaggggaagtggtgtcctggtgagaaccaagtcagaatgtggcttgaaatgagctcttgtatgaagctggcaaattatggcttatctttcctttagtaggttttcttcatttatttccttaatttaatggaatgccttagtgctatttcaattaaaaaatattgatggtaaatgtttgggaggacattctgcatcctttgatgctcaagattttctgttctccaaagcagtagagacattagcctcactcaaaggagagtaaaattatgttcaatgtgtaaacttgcttgctgcgtaacaaagtaatattatggcagggtgtttgacagagactctttagcttaatgaaattctatcagggagatgcagttttaatagcgtcgttcattgctttttgtccctgtagtctttaaaggctcacatgtggggaggacagtggctgcatctgagctgccagcagcagtgcaggagttcagatgtgaaatttcactcatgccagcatttccagcatttatttttaatcaggatctgcgcttaccgatggcctgttaaaaaggaattgtgtaattagcctactaaatcaccttttcttcctcagtctcttcacatctctgaaaaacagcccccatatcactgtggcttactctctctctctcaatatgttgtaggaactacagaagtttcagcatacccacaaatactgggttgaatacctcttttcaaacattagtttttgaaattgtagtcaggtttttaaaaaacggttgaatcagagtatatcaaattgtcatgttaacgtggtaacatcataaacaagtttccttgggagataaattttgtggtttctgtacatagagaccacctttctttttggtcgacatttcattcctcctgtgtttttgttttgtgttgtgttgtgttgtgttgtgttgtgttgtgttgtgttgtgttgtgttgtggagacaggatcttgctctgccacccaggctggagtgcagtggtatgatcgtggctcactgcggccttgacctcctaggctaaagtgattctctcactttagcctcccaagtagctgggactacaagcacttgccactacgcctggctaatttttttctttcttaaaaattttttgtggagattaggtctcactgtgttgcccagactggtctcaaacacctgggctcaagcgctccttctgccttagcttccccaaattctgagattataggtgtgagccgctgtgccgagccagtttctcctaggttttaaaagattgactttatagtttggatctgcaaataagttttaaaaaattgtagaacctgttcccatgtatccttcattcagtctctgccctcattattgacattttgtgttaccatgtcacagtggtcacaactaataaatcaatactgaaaatctctttgaatttataacaatgtctgattatttagttttactaatctcaaaatttggaacaacataaatcagcaactttcaaggtttttttctgaaagaaagtagcttagaaatgtatacaaaagcaaatcaactcaaagtgtgtgtttatcatttagaaaggtaaaaatctatttttcctatcaaaattatctcttaatgctttttaatttattttcttgagtttagtaattctatcttgctaatgtaccttcaatttctacttacttagtagaatgttaatattacagatcgagcatccctaattggaaaattcgaaatcggaaatgctccaaaaccccaaaatttttgtgtgctaacatgatgctcaaaggaaatgcttattggagcattttggatttcagatgagagatattgaaccggtaagtataatgcaaatattccaaactctgaaataatctgcaatctgaaacatttcttgtcccaagcattttgaataagggatactccacttttattcttattcaccaagaaaccaccagagaagacatcaagcatcaagtgaaagctacagatgagcactttacttttttgggagtgctgtttgttcgtataaagaagtgaggctttttaagaagtggcctttttaggccttagcacctttttaagctgatcactgtctccttgtctatagaggggacccaggaaatcttaggtgacagtgaggctcagggtggagcttggttacttgtctcagcatcaagggacaggatcaggggaaaggatgctgagctgtgcttgtgggtgagaaatgagttaattaagccctttctgccatgataactctggtgtttgttttctgctatttaggctatcaaagttagttagtgactcacagcaaaaagaagatactgatattttcttgggttttgtttataatcatgttttgagcttatatagacatgctctttcttaaaattcatttatttgcttttcatccatggaaaaccagttttttttcaatgagttataaagtatttaataagaagagattctgatttaattatatccagagatggctttggatcatgttatttaagatggagaatgactatttagaaatattaatgtttggccgggtgcagtggcacacacctgtaatcctagtactttgggaggctgaggcaggcaggtcacttgaggtcaggagttcaagaccagcttggccaaacatgttgaaaccctgtctctaataaaaatacaaaaaatagccaggcatggtggtacacacctgtaatcccagctacttgggaggctgagggaggaaaatcacttgaacctgggaggaggttgcagtgagccaagatcatgccactgtactccagcctaggtgacaaaacaagactctgcttcagaaaaaaaaaaaaaaattggtgtggtagtgcatgcctgtagtcccagctgcttgggagcctgaggtaggaggatcacttgaacccagtaggttaaggccgtggtgagctctgatcacacccctatactttagcctgggagagacagcaagaccctgtctcaaaaaaaagaaaagaaaagaaatattaatgttcatatgtatctatatattatctatatctgtatatttttatattataatttaaattatttcagtagaaatttgaagtaggagttttagggagaggcaaaaaggagtgcatgcattaaacattcctttagggtcaagacgatggagccattgagtacattttaatgaatgtgaatgttatctgggctgctagaaaagaatgaaaaagccatacttaattgtttaaggaaaccatagaagaatctactgttgggtaagttgctacccaaatatacatacattctttttcaaaatatatcctgaagttcatattttccaccattaaatctattctcttcctgccaggaaacctgaactagagaggtttggaggtcttatgttgttacgtgccaaaaatatagaaagtaatttatgagaaggacaagaattgtgatacattactaaggcgcatgtaattttctaagtactaaactgacaggtgttttatatatatatttatgttttattggtaaagacagaaaacaaatacatcttagtcaaacagtgttccccgacttaccccatcaatgccaagggcacaggagggggtctgcagtaacttcctgaagcaaagcacggaggagagcaggtaacccatgacatgacctggcttgcgagccttgatgttttccgtgggtttcattctttcctttgagatcccaggcaaatgacacaacataggttgtaatggaacccctccttttccttgtttagactcttgaacatctcatattgctcctgactgccagcaaccaaatgaagggcttcattagttatagctaattaactacacaccagactgaaggatttctagccaaggagtttggggttgctttggaataatagcgagaagctagtcttttgagttttaactgttggatccctagcttagaaagttaccagtaccctttttaattttttactctgtaatgggcaggaatagaaattatgtacaacagtggaaaagtagaagaccatatcaaacctgatgtacccataagaagtagttggacgggcatggtggctcacgcctgtaaccccttcactttgggaggccgaggcaggtgaatcacgagatcaggagttggagaccagcctgactaacatggtgaaaacctgtctctactaaaaatacaaaaagttagcagggcatggtggcgggtgcctgtaatcccagctacttgggaggctgaggcaggagaatcgattgaacttgggaggcagaggttgcagtcagccaagatcatgccactgcactccagccggggcgatagtgcgagagactctgtctcaaaaaaaaaaaaaaaaaagatgtagttaatagcatatgcttctccttaagtgatcacccaagttgttggagtttcctaatcatcagtttttttctctgtcattttgagcttcctggaataggactgaatttgcaagttgaatgattatgcataaggctcaagaaaaacttgaaggcagataaaattgatttatactccttagctctaccctaccctatctacaggtatttcttggcggtcagtgaaggatcaaacaagaacagggttgggtaatgctgtcagcaggcccactacatcccatgccaggcgctcatggcgtcctgtctctgctcctgcctcactttccacctctctgcccagcccccataaatagtatgtgggaagctgggcacagtggctcacacctgtcatctcagcactttgggagccgaggtggatggatcgcttgaggtcaggagttcgagaccagcctggccaaaatggtgaaaccccatctctactaaaaaatacaacaattagctgggcatggtggtgcgtgcctgtaatcccaagtactcaggaggctgaggcaggagaattgcttgaacccaggaggcagaggctgcagtgagccaagatcgtgctactgcattccagcctcggtgacaggggaagactgggtctcagaatgaaaacaaacaaacaaacaaacaaaaaaaagagtgggtggggctcctgatgccttcgccattgtgattacacaatacttctacctggactgcctttctcccgctcccatccccaccttcacctgggaggcatgctattgcgttccccacagcacccaagtcaccccgtcatggctctgtcatgctgcatacaccactgctcctttaaagggtcatttctcactagacacaggggcagagaccatgttgcgtattttcttccatgccccaagccccagcaccggacttggcctatagcaagtgacaatgcttgtttttattaacgaatgagtacacgatcccaggaatctcgttgaagtccagttctccacgtggccacccttgactcccacagctgacctgggattgacaccgtggccagccctgttcctcacctgatgcctgcctgtagtcttcggccttgctgctccagaacttttcatcgtggcccctttagggccatggcagcacaaatacacttagtaggtgaggccatgaggacacctaccaccattaaggatgcctgtggggagtagggagatggaggataggctggtaagaccctgccagtgcgggcctgcctcagtgccttggaacgaggtattcccagtgcctctgagctgcatcccagtgtgtcctgagcacccatctggcctggcaagaagcaggcacgaaaggcatatgggccgtagcctctagcctcctgccacctgcattccaagccacgttccagtagcactttaactgaaacatctagctacacaagatgggctgagcactctacacagatgctggtccatgcagaaacaaccctaccccttctgcacctgaaagggttccctctgattagaaaaggtttgcttcaagttcggttataaaggaaggcttgtgcatagttagtggggaagccacagggatgtgcaacttttccctacagccctgaggttccaggcactaagaacttggcacgtctttccatgctggctgaaatcaaaatgaaaccttctttgacttttgccccttctgctggggcattgacattggggtttgacactggctcagacagtcaaatctggaagccaaaccttagaagccaaatcttagggtggcattaggactaagctgagaataaattctcagtgatcccattcatctgcctcccagtgtactaaagtaggactttgaaccttccagaaacctgatatgttggcaatttctcaagctttgactctttcttccccattgcctctaaaccctagcttgaattttactggctgccttataattgctatttgttaaaaatcaaaacgattttccatcctggtaaaatggtaaaaatatcagtagtttgcagacagtaaatatctgtctttaatacttcaaaaacaagccatatttgcctcctgcctgttttccttatgagggaattatgctgtggggtggtagagtgagaagggttaaatcactggggacccaccttccctcgttcctcatggaatttagatgaatgtgctcttgctaaattctccagaacgtgtatgtgcgtcacccccacgctgcccggcccggaggtggctggaagtctcactttgtttttcatctgctgggtggtgaccagcagagagcactgagcggactgttctttccaatgctataaaaagcctgtttgcaaaatgaggatttctgcttccaggggctgaattccacgtctgcattatgcttgctgggtgggtaccaggcacagtctgtggcttggtcgtagcctttgccatgtcttttgatgatgtgacatgcctgagacacatggtggagctctgcaggtggtgagcagccacgaggctgtgcttgcatgctggagcagaaccttgttactgctgattgaatagtctcgcagaccccttttctgtcaaacgcaaagccatgtgtttttgttccatgtggaaaatcacacacattctctagcatattacattgtcattatgtcaacatttttaaattttattgtttaaattgacgaataaaaattatgtatatttatgatgtacgacatgatgttttgatgtatgcttacattgtggaacagctaaattgagctaactaacatgcattctctcacatacttatttttcacgtgtggtgagaacacttaaaaactaccgtctttggccgggtgcagtggctcacacctgtaatcccagcactctgggaggcttaggcgggtggatcacctgaggtcaggagttcgtgagcagcctggccaacatggtgaaaccctgtctttactaaaaaatacaaaaaattagccgggcgtggtggtgcgcacctgtaatcccaggctgaggcaggagaatcgcttgaacccaccaggcagaggttgcagtgagccgagatcgcatcactgcactccagcctgggtgacagagcaagactccatctcaaaacaaaacaaaaccaaccaaccaaacaaacctcacaaaactactgtctgcagttttcaagtgtgcagtatattgctattaactgaagtcaccgtgatgtagacttcttgaacttattctgcctgtctaaatgaaattttgttttctttgaccatcgtctccccggtccccccgctctccagtccttggtaaccacaattctactttctgcttctatgagttcgacttgtagagtccacttagaagtgagatcatgctgtgtttgtctttctgtgccttacttatttcccttaaaataatgccctccaggtccatctatgttgttccaaatgatggtatttccaccttttttaaggctgaacagtactccactgtgtttttagatcacattttccgtatccatccattgatgcacgcttaggctgtttccctattttgactattgtgaataacgctacagtgtacatgggagtgcaaatatgtcttcaacatattgatttcatttcctttgggtatattctcagaagtgggattgcagcatcatttgatgattttagttttaatttttcgaggaccctccattgtgctttccgtaatggctgtttacaaatttacactcccatccacagcacacaggggctcccgtttctccacatcctaacacttgttcttattccttttgttgatagtagccattctaacaggtgtaaggtgataatttattctggttttgatttgcatttccctgattattagtgatgttgagcattttttcatacatatgttggccactttttattttgaaaaatatctatccagtgatcaccttagccacacatgtactaaatatgtctgtccatttcctttgcccctttttaaaacaggtcatttattttcttgctattaagttatctgagttttttatatatttgagatattaatcccctttcagatatatgaattgcaaatattttctcccattttgtagggagtctcttcactctggtgattgttccttttactgtacaagagctttctagtttgatttaacatcatttgtctatttttagccttattttttattgtgctttttaaggttatatccaaaaactcattgctcagaccaatttcaagaggttttttttctttatgttttcttctagcagttttacagtttcaggccttaggtttttaatacattttgagttaattattgtatatggtatgagatgaggttataatttcattcttttacatgtggagatccagttcttccagcatcattattgaagattatcctttcctcattgtgtgtttttggcatctttgttgaaaatcaattgactgtaagtgtgtggatttatttccaggctctctatcctgtttcattggtcgatgagtctgtttttatggccagcactatattgttttgattactatagctttatattagatcttaaaaaatctggtagtctgatgcctccatctttgttatttttgcccaagattgctttagctattctgggttttttgttttttttgttttttgtttttttgtttttttgtttgtttttggtggttccaaacccatcttagaattgttcttttaattttagtgaaaaatgtcattggaattttgaataggacttgcgttggatctgtagataactttgggtaatatggatattatagcaatgttaattcttctaatccatgaacataaggtatcttccatttatttttatcatcttcagtttcatcaatgttttatagttttcagtgtacagatctctctctttcttggtttaattattcctaagtcttttattttttgaagcatattttatcacacgtttgattacttttattaatgcaactttcattaaacaaccagaaatttttgttttaagactcatctggtaattcttttctatcagagcagggttaaagtttgctttgaaaatgatcacatggagatcaaactctctttagcgaatgggtagactgaatccaaggcttttttttttttttaacatttaaatgccctctccacaagccccaccacaaagttattttgaaaatacgaattcagtactattcgatacaagaaaatgttggtgtagtcagtgtcttacaatgtatattttaagtgtattgtaaaaaagaatattcagtgcatgaatttctttttcttattcttttttttttattttgaggtgaggtctctctctgttgcccaggttggagtgcagtggcacaatcatggatcactgcagcctccacttcctaggctcaagcaattcttcttcctcagcctccccagcagctgggacttcaggcacacaccaccatgcctggctaaacacatttctttggaagagtgccatttagctagaggcttggggatctttaaaaatactagaaatgacatctataactttgtcagaagcacattcactcattaattgatagaatcattgtccccttatttagactcaaggcttttgttggaataaatgttttcccttccttcttgtttgtgttaggctttcttcttttctttgccttttaatgttctttcaaacaaatagaagactgagtgcattcgctcagacatcttcatttgttcaaataaactccattttttcagacagacttgaacaaatggagagacagttcgtgtgtcacctaggtaaaggctgtctgctaggggtccttcaacaagcaaaaccaaggtccctgcacacatggagttcatattctagtgaggagagacataaacaatttatgcaatttgtgtcaacctgattggtgcatggagaaggcagaaaaggagggaaggaagtgagccaggtggtcagctggcagagaagcgttccgtagagggtacaggtagagtacaatcctgaagggtgcagaccttttagttctgcatcttggtggtcatatgtattggaagagcttgagaaaaatgaaaataccatttagcttaagaagttgtgagttatctgcaagtcaactcatttcaggagtggaagaatccccggaatgatttcctaatatcaaaatgtatgcaggtttctcttttgaatgtcttgtatatttagagagggtgctgtacaaagtctcttgttttccatacagcaaattccaggatcccttgctggatactgtggctggagcaatgtgagcaacagaggcagagtccgggaggtgatgtggggctggggcactcatcatggccttataggtctgcgccttggtccacattcgtactgcagttattgtttttatttgtgataatgattttatactaaataatggtgatattcctaccatatttaccacgtagtagtgtctgaggtttctgattctttcgaacaaatgcctcctgttgaccctgtttccatttaaccaatcaacctagatttctgctttttgccccttcatgacaccaacacagtgggttgaaattcaaaacaagtggacttcatttcatgatctcatgtgcttcttatttaaacaggaaataggagcattgcatttgacaacttttaactgtgtagccagataattagcttgtgaaaaacatactcagttttacaaacaagttgtgattctggaaagtaaaattagtcattatagtactactttgcggatttacctcccactgcatgctgttaagatctcatctaagcaagattaataaaaaataaaaaatcttgactaaacatctgttgcaaagtgactttcaatttggctcttcaccatgtgactggtgattagagtttttggtttaggttaaggggatttgatttgatttggcatggtccctttttaattttatgtatgaggcaaataactgaaatgtccctgattgtcataagtgaaaaaatatcattaaaatatttgaattttgttcaaggagattaatctctataaaccaatgttttgtattccctaattagaattatggtagtcaccagtatgatcaatgctaagtgtttatttggtaattaggaagtgcaagctctaaattttgataagattgatgaaatggcctcttctcatattttcattatgtccgtataaacataacttagaagttggaaatatgaattttgtctacataacagtggacatgctacaacaaacaaatatatagctacaaacaaagctatatatttacattgatatccccttgattatttttctcaatgagcagacattcaagagatttttttcccccacaaaatgtgatgtgaaacatctacaatgtatacttgccaagtgcataactattaacttactccaggtaccagatggtcttattaagatactaattaatgtcaactctgacaagtgaagctaatgtttaaattcagctgccagtaagttctctgtcagagcactcccaatagaatgtgagttatatgcgggcttctagaacaatgtccaaaacacagtgtgccttcgcaaaggtttcagcgaacggataaatactgtggctacattccctttctaggaaataagaattataaaaaatgttgatcttctaagtttaattttattatagtttgaccttacatataagttgtgttttgaaggtaccattcttcccttcttagtaaaaatgtaacagcatccatacgatgtgatttcggctgctccattttattgttgatctacttgttcttcaataatagaactcttgttttataataatttccataccatgtttgttaaccaataatatccataaccataacttgaggcactttgttatagctgatcctgaggttaggaatacttccttgacatgatacatacagtatattaaaccaacattcaaaataatagttaaaaattagacactaaaagcgtgcccattaaaatcacttaagaaaacaggcgcttgctgtcattattataatttgacattaccgtgatagtgcggcctgaggagtaagtctagaagcagaattaagacctacagtgattagaaaagacaacacaaaaatattgacagatgttggcttgatgtatttagaaaccctctccaaagtgggggaaaaatagtttggaagtaataggagaattctgtaggttcaattgcaaaatgtacacatcaaattcaatagtttaccctaatatacaaataaaaatacacaaaatgttcaaagggttatttaaaaaagcactccctccaaaagacacaaaaataaaaggagctgttaaagatccgtatgatgaaaaccacaaaacattcctgaaatggcataaaaatagacttgaacaaatggagagacagtttgcatgtctaagtgggaaggctgatattgtaagcctcttcaattaatttaaaaattcaatggaattccaatttgaatcccaataggaccttgtttcagactcaataatgtgtttctaaagtacatgcaaaagaataaattggcaggaatactcaagaaaaatgtgaaaaacaagggtaatgtgaagtaggccttgcaatactgaatagcaaaaccatttgaaagctacaataaagtattaattaaattgaaagtactctgtttctatataagtgtaagagcaagaaggaatcctttcaaatacaacattaattacatatggcttataggacatggtgattttcagattttcttctttattttaaaatatataaaatatatactttatattttatacatataaagtatatggattttatacataaaaagtaaataatatatgtacattttatacatatataataaatacatataagtatatatactgtataaagcatatatacttatacataaatctatataaagtatactttatatactttgtatgtatagaatactttatatatgtatactttaaacattatatactttgtatactttataaagtataaaatacgtatattttatacattataaatgatatactttatattttatatagtaacatccattcttcttccttctaaattttgacagacaatacagttgtgtagccactaccaaatacaagatttagaatatttccatttccgtaaaaatatttctcatgcccctccatagtcagttctctcttctttgtcactctagtactgccttttctagaacgacattaaaaatggattcatacagtgtctagccttctgtatctggcttattttgcttagcatgatgtgttggagattcactcatgtttatttaccagtagtttgttcctcattcttgctgagtactattcatcatgcagatatgccataatttatttgtttatttagtaggtagtaggtgtttggagtgtcccctatgtgtggcaattatgaagaaagctctataaatacttgtatagaagtctctgtgtgggcatatcttttcatttctcttgggtgaattcttagaagcagcgtggttgggtcatgaggtgagtatattatcagctgtatatgaagctgccaaactatttcctaaaatggctttaccattttgccttcagaccagcaacatgagtttccattgttctgcatctttgtggtggttgtttttttttttaattttagccattctaataggtatatagttatatttcagtgtggttttaacttgcgtgttcctattgactagtaagatagaccatgctttcatgtgcatcttggccatttgtgttccttttttgattaaatatctgctcacattttttgccaatttttggtgggttattttcttcttattggtttttgagagtttgtcatatactgcggatggaaaccctttgtcagataggtgtttttaaaaatattttctccagttctgcagtctgtctttttactttctgtatagtgtcattcaaagaccaaaaatttttaattttgatttaagttcaatttatcaattttaaaattttatgtttcatgctttttgtatcctaagaaatatattcctatgcctaggtcacaaaagttttctatgttttctttaaaaagttttgttgttttaagttttgcatttaaatctatgatacattttgagtcaatttttgtatacggtttaaggtatggctcctttctttctccctccctccccctctcccctcccctccttccctctctccttccctccctcctttgctccctccctacttccctccctcccatcctccttccttcccttccttccttggtatttgggtatccaactgtttcggcaccatttgttgaaagtacagtttgcacattgatccttcttgacacgggtttttttttttttttttttttttttgaaatcagttaaccctatgtgtgcagccagtttgttttatttgtctgtctgtcctttccagtaccacactgtcttgatatctgtagttttataataagtcttaaccatattgagtcttccattccatgaatatggtatattcctccaatttttaggtcttatttgactcccgtgtcaatgttttgtgtgtttcagtatacaattttgtgactttaaaatattcttctgtatatggttttgtgttttattcttcatcaccatcatcatcaccaccattcatttatgtagccagccactgtgcaaatatccttaaatacatatctaattaaacttttcaagaattccagattttagaatcatgatccgagttttacagatgaggaaaacgaggctcagaaaggttaaatagcctgttaaaatttatacagcaaacgtacccttggtcaagtgattattccaaattgtctgcctttgaaacctttactcttgactcctaaactaattttgtatcatttatctatataacttttgccttaagaccaaaaaatattggccgggcgcggtgactctcgcctgtaatcccagcactttgggaggccgaggcgggcagatcacctgaggtctggagtttgagaccagcctggccaacatggggaaaccctgtctctactaaaaatatgaaaaattagccgggtatggtgacgggtgcctgtaatcccagctacttgggaggctgaggcaggagaagcacttgaactcgggaggcagaggttgcagtgggccgagaccacaccattgcactccaccctgggtaacaagagcaaaactccatctcaggaaaaaaaaaaaaaaagacaaagagtattataaactaatgaaaagagcgagggtgatgttgggatccatatttggcagggaagcaagatatttgtactctttcttacaacttccactgtattttgttaagacctgaatacacctctacagtggacagtccaaataaataagccattcccgtacttaagaagcatgcatatggtggagctttatgtgcaaaagcaacaaagccctctagttatattttagctcctcagatacttttctgagtgattattcctgctgcttaaatctctgtactactcccttttgcccaagttaaaatacctaaatcattggttgtagttctattattgtattcagtaatagttcctttgattggaaaagaaatacctcctttttagaattccctggcagtctgtaataactcccttttataatatttgtaacattgtgtcttaattaattgttgtcatataagtcttctcactagattgtgagtagaagctgttttcctttggctttttgagatgtttcatatgtacaaaaatgttgaatcagtattagtgttaaacacacgtacccacctaaattcactacatattaacattttgccatgtctgcattatccctgcatgtgtaaactttcttttctgacataccaaaaagttggtcacagacacagggacacatcattcctcgcttcatgcaactcctatgaataactgctctgtaggcacaggaatattatgatgcctatgaaaatgaacaatgattcccgaatagaatgtaagatctcttccctgtgaggttttccctttgaccttaagggtccccaccatttgtcttgtcaaatgctgtatactctgaatctgtctattcatttcctcatgatggaacatttttggcaaaaaaagtaactacttaagtgatcctgtgtgcttagcattctacctaaaggcccatactataattaggaagaatctatagggtgttgttttcagattgagtgagtgtcttcgtccccaaagaccttttacctcgaggtttcagtgcccattgaggagcctcctctggaccaaccattcctttaggagttgaaaccttcagttatcaagttctcttcttcattccgtgtttttttggctcatagtcttccgtaggtcacagctttacttttgccctcaaccctgccacgtcgcctatatgtctgtgtagacacatggatttttttctcattcaatttgctacatttgtttgttgtcatcgttcattttgatattcagattgtctcaagcatcccacacgtggccaggggagcctccccacaccacctcctgtgtccttttgacatggccccactagcctagaagaaagacgtgacccagcctcccactgaggtcattctggtcaggggctgtttttatctcctgctgacctactcttgggaactcaatgatgtcaacacactgcacactcattgaatgttggttgagtgttgcacttggcagtgctcttcatggttttgaatcttcttgtcattttagccttatcccctccatttctcatgacccattctagaaggacccatttagggaagcttcaatttcccctggggtgtggggaaagtgagacaaggggtggaagtagaacctcagtgggttgtgcttcctgtgttgatgctttcctgcacaccctgctggacaggtacagggctactgcagaattcctcgtgggttcccacaaattgagtctcagtccaccacagtaggcgattttgaaaataagcattaggcatttatgactaaaatcactttggtagcttatgtagttgtaagtagataagctattggatgatcacttgtcatgtgcagtgtttgagcatacaaccgcatacaacatatgtatgtattatgagtacatacatatttataagaaataccataaaagattatctatgtttttatttactataatctcatatttcaaagtatcttttattctccttacgattcatttatttaatgttttaatactttataatacttaagtatcatcataaacatttaatacttaatatttaatgatgtgtgtgacatttctccttaatacatcatccaaccaatgttaacaatgttgaggacagtatccttttatgatttatgtaaggcattccattttagctaagaaagagtttcaactttcatttataacaatgataattgtagtgtcctttatctatgaaagtcagtttaaaaacacgtatagacatattgatcttctcttcaataataagagtttttttaagaccgagttacgctcgtttctattatagtgtgttttcagatcctctatatcatgcgataagacttcgaaaattctaaactctctaaggctctattattacgtgatatattgagtatataaaaataacgtataaaattttctgctttgctgtcttgctttaggatcaaatgaattatattaagaagctgcaaacaaagtatatagtcctcattacaccataaactataattttgtatgtaatatttgattataatttatttttatacttcataacaaatgtgaatatgtgtttaaattattatactttataagtagcaaataactgttatgggtaatttaagatccagatattcccttttggtatatttgtccaataaacatcttctgcaattactgccactataaaaatgaaatcgattttgtttttaaattatatttctttccttatagtgcctggaatggtatgagatactagtactctataaattcaactaagcactcagtttaaatttaagatacaggtttaattttgttgttagtagttccaaatagctaaaagatgacattagtgtaagttattttctgttttatatagttttggctttttttttttttaacaaacattcctcactctaaagttctttataaaataaagaaattgtaatatttgggagattaaatgagtaaaaattaattatatattgaataaaggcatcatgggaatgaattcatctttaaatgaaaaaaggaacaatttcaccatgggttgtttatatgggaaaggttttatgagttcactgatgagaatggacacccattttccggtgagcttcagttttaacaataatacctgaatcagcctttttattatgtcttatgcttaatcaaatatttaattaataaaacgtgacatactttttgagggcacagcgatgactcctgacattcaatgtatgcggcactgcacactatcctctgtcctcattttacaacatcgttctttctatatttttaattattctttctttcttatactccccgcccccttaatcttaaaaggattttgaggtagctttaaagaaattctatataatatgaaaacacatgtgtgagaaaatcaaagcaacaaggagaagctatctcatttctatttcaacaaatataagtgaaagaacaatgttacaaggattatagaattttgcaagatttttccaagtatgttattattttaaatctgagaaatatgatagttataagggcaaatcgtttgacttgtcctgaaaatcactaagctgggggaggaatataaggaagatatgatgatcatgaatataatctcatatctacctgaggatagtaattatagttctttggctgggcgcggtggctcacgcctgtaatcccaatgctctggaggccaaggcgggtggatcacctgagatcaggagttcgagatcagcctggccaacctggcaaaaccctgtctctactaaaaatacaaaaaattagccaggcgtggcatacctctagtcccagctactccggaggctgaggcaggagaatcacttgaacccaggaagcggaggttgcagtgagctgagatcgcaccactgcactccagcctgggagacagagcaaccctccatctcaaaaataataacaataataattattattattgtagtttttttacttctcttacattttctaaatgttcttcctttcctctgggttctgtttttgtttgtttgggcctcctttattaatgctggatgaatttttttcacaaggcccagtactcttgctcagaccctctgtctccaagtttgtgcacagagcatggaggcgcatgggctttcctgcatggcaagcctggatgggctgagctgtcatacttttggaacctccatgcttagtattagtgcttatgttctctttggctggtcattttcaccaaagaggattcttctggtcttctttctaggtttggtttgggactaaggttaggaggggttagtttaagcctccttgctgatatgctgggagctgagcagaaaagagagaggggagtatactgtttggtttgacatcaaactaaacaggtgtttcttccaggtggttcttgtcattttcttctgcttttcaggtacctcccttgtccagagagtaaacatgtggtcctctccccaggagtgagttggagagcccctcactggacatgctgggcataggcagactggatatagggtcacatttcaaagccatcagcactgttgtttttcatctcacatgtagcctcctgagtacctggcaccctccagtttctgggccttccttgggttttgcaccagggattcacagacttcctgttaaatgtcaccacgttcttgccttgagggcagttggtacccactcatcaccctctttcctgcttccagaattctcttgtctttagttgcatctcctcagagtcccctggtccttgtgggcttgtgcagttttaatatgtgccttactgtcatttaatgtgaggaactgggaatgcatgttttaaatagtttctaatttgtgatgtaggcaacccctaagtatattttgaaaaacttcagctctgtgcagactttgcaggagtttggggctaatttataacattttgaggttttgtttgttttttggactccctgtttttctctttcatattttctcacagaaaataccacctatgaacattttgccattggctttccctctacaaaagagaaagccattgtgctctgttggccttctatcttatcagctctaagaactcactcatacttggatttatttcaaatcattttaaagaaggacttgactctcagttacattcccttttcctatattctcttcttcataatattgctttacagtattgattctttggcttgaatgcgccccaaaagaaaaatcatccagaagtcatcaccattatgttttttttgttgttgttgtttagtaatatattttaaaatgttactggataattcattttcattgctttttatgatgattataagatgggtttattttcattaatatatttgaaatttaagcatttgagtgagatttcctcttcaaagtccttgccttagtgaaaacacggttaaactttgtaacaagacctcagttgaaatcatgaagcataatcccggattcagtcttcagggttctccttttattgaaaccgggcacctaccgtccacactcgtcactcctgtgtctctgtttacagctccaacagcttctgaggctgggaactgcccagagatcctttggaatttagagaacttagaagaacgttaaaatttctgcctgtgttgtgtgtcccagagagcaaatctgtgctttgtacaaagtgtgagctccagggtcgattgagacagctcttgtctggctgatgaaattaccaggagcaattttataccctgctatccaagtcacatggctaagtccatttttattacaccttcacagctcctcaagaatatgaattaaaaccctttggatttttttcttctaattcatacttagaccttccactaggcatagttgacaaaggcactgtttaaaagatatgtctcatcctgagtttccattcaccagtctgtgcttttgttagccttttgtttttatatcctgcaatgacatcctgcattcaacttgcctgtcactgaatgtccccctgctccaccaccagcaccccattctacctgtgctgttttccttctactgagactcacttccacctgtgcccagttccacctgcctttccttctacccagcctcagttctacttgtgctcaattccacctgcccttccttctacctgtgctcagttctacctgttctccatttttcctatcaacctacctagtgaaatgggggcccaaacacatttaaaactggggcactgaggtacttccaggagggctgggggtgtgcggggacgacttctgtccagggctccctccaggagcagtgccaggcagtagccaaggccacaccaacagggggagccctgcgagagagattttttaagacaggagcttaagaaatggaactagatcaggggcaggcagggagagtttgtccctcctgccagatggatccttttctttctggaccacctttaaaaatattaacatactttctctttataaaaacaatctgggcttagtctccctccactcatgactatctggtatcttttctagtcattttttgtttttcttgtactatatattctttatattggtcaaatgtgtatacataattactgcagttttcctcttcaattattttctcatgctattaaaatattccatatttgcataatgtttcttgatttaatggttgcacaatatttcatcataacacaagttatgattgcttgacttgccaaataaaaatataggacccccagttcagcttgaacttcaggtaaacaacagttttttttttctagtatatgtatctctcatgtaatatttcattgcaacgtttgggacatatttatttttctttgtttatctgagattcaaatggaactgggcatcctgtactttatcttgcaaccctacaaaatatcatattatttacacagtttcttgtggtggatgtttagaattttcagcaatgctatggacatctttgggtatgaaattttctattttgaattacttcctttggtagattatcagaagtagaattacttaggagatgagtatttattttcaagacttttcaaacctatctccaaatcactttttaaaaaggttatagcaatttatgttcccaccaacagcacacaagagtcctcgttccctgcacccttgctcacattatcatcattgaaatacttctttgctattttggcaggcaaataatgatgtatcattttcatctttgattactaatgaggttcacttttttttgttgtttattaggcatttagtgtcctggtttttaaattttctgcaagtatatcctgacttctgtggccccattttgcattgctttgaagttataaggaatatgtcttatttttacttattgacttatttttactcagctgctggtgctggagcctagtccctatgttcaggctcagggatggttctgcacagtggcttttgctcccagcctacctgctagcctacccattgtctagaagataaaagcttcatttaggagtcatctcccaaatgcatttaaaataaatcagttaaagcacagaatagtaattttcttctgagcacacagaattaaagttttattttcacagagctcgctcacttttgttcctaataaatgactggtttcaaaaggcttccataaatacccgttttatccacccttataagcccacagatatgctgcagggttctgctgtgttcatggaaaccataaggcttcatggtatctgcagtatttgcccaaaaaaatactgataacccaaggatgggactccattcccaaagggcagggaggaaggggaggggcatttcagtgaattttaatatgcagatcatccgtttcctaatggagttcatgcttcaccttagagctgaaaaagcaagacttactttcgctaagaaaggaaagactgaacgatgcacatgacttctggaacatttccttaagtttggtaaagagggcacgcacagtgcccggcagcaccgcctctaacttgtggagatggcccatccttctggcccttctgggcctcctgtaattaatccccatcgcagttaaacaaggggccgcgtggttgccttctctgatatgctcttccagagagacttccccacggggcatttacatcctcccaggacttgttttatggaaattgctgtgttcgcttcagtttttcgttttctgtgttacaacggttttggcatttgttgccttgcatgaatttctccgcatgacgtgacagtctgctgcctgaattcagtatgtccacgtcacctgttcacgtcatctggcctgagtctggctgcactgatgtttctcattagtgttactctgtgctcataccctcagcattttgagaccccctcaaggattatgcttttctttctactttcagcctgatcatttaagctaagcacattgatacattgcttctggtgataaatagctgactttgtgatttcatttattctaatgtgtaagtctccattgtgtaactggtttgacctgcagaaaattgatttcagcacctactaggttcacctaggctgatataggcctcttcttcagcgggaaaagctcctcctctcaaggggaagagtccgggtcagcgactgcatcagggtcaattgtgggcagagtacttcgaagcctcttcttcctcaccctcttccagctttctctgatgactgcaagcgtagaggaaagtgaatctctaccttgtgttggtcatcagaagtggcttcagattccttagaggaagagttaaaatgtgcatctggatgaggggtaaagaaatgaggtcagccagtaagtacctgtcttatagtcctagagtacagcctccacacccagctttgccattcactccttcagagagtgaaacctctaagcctcagtttcactgcctgtaaagtggcacaggaagagaaatttgtgtgtgattgaaagaggtcgtattctattaaagtgacagtgttgttattaagacgattatccacgggacacatctcattgtcataaggagtagacaagatacaaaggcagcctttcttgagctgaatggtatgccaaatatttatatgtttcaaaagttcacaaattttgccattttactaatcattgcctcaatggaaaacaagcattatttagctgtttccctgaacaccaacttggaatctaaatctcagcaattatcatcattcacaaataatttatatttctgggcaaatggaagatatcatatcatcattattgtgtttgttcaatttgagtaatgcgtccttcgaggactcatttggaagtagatatgtgtactataggtataaaatggattggagaaaatattggattttaacatttcactgtaaagcctgtattccaaattaatataaaagacatttaggcattctgatatattgctggtaaaaggagagttagtaaaagaatgcaatttgagagctcatttaatagagaaaaaatagggacatgtctcaaagtgtgtttcatgctataattttaccaaacttgtactggcttaatgggaaaaaatatatatcctgtgtttcttaaaatgtcattaacttagggggcaatatttaaaagcaaggaaggctttacaatgttgttagctacaaagcctagcagtgagcaattgcagttaatggcaacagaactgcctagctcacaacccgccaccaaagcaaacacccttcagggcacgcaaacaaacgtgtgcacacccacgtccacacacatactggctgcctccatttgcaacagccggagagacgtttcagctttggccctttaccttccccattcttgattttctgtgttgctttcttttttcctccttcttttcctttccacccagctccgtctggtctgagaaactcccagctctcccacttgacattctgatgagcccacattcctcctgtccttcttctcggggaggagaattgggccataactcattgtggagttgtggtgattgcctccacatcgggcacagggggatacaggctgattttgagaaattagaggcctttctttgccatggcccaagaggagaggctgcacacacattttgccggataataagggcagcaagtttccaagagagcacaaaacagaagttcccatgatttccatcctgtctttaattttcttgtatttaatgcaaaagtatttcaagcttatttttccagtctggacaaccctgtatcaggaaacacttgaggtattaatagttagagagaataaaatacagccctgagtgtgagtgcaccagtgtttctcattcatgttactgtgtactcatgtcctcagcattgtgagaccccctcaagggttttgcttttctttctactttcaacttgatattctaaggaccccctaccaaaaaacattcctgaggttggaagtgacccatgccttatgctgatcttccctgagagaggggcagcagaacccagggctccctgcccatgccccgttgcttctccctgacagtttcaagtcccagaatctgggatgatttcggcttttcccatgagtgttgctctgtctcatctaattctatcttttgattcatttacagggaaacttcgtggcttgcatgacagctattttacgacaaatggaagattaccattatgcccacttgatcaagacttttgggaaaatgaggactgatgtggtagtaagtgtccctttcaccctgttcacataaccatgttttagggccagcactttagacaaaagcctgatatcaatatattcatttaaaataggattttgcatgagaacttgtctctgattgatttcaaatgcctcctgggaaggtctgactgaagccttgtttctaacaagacaagggtccggacttgcagacttgcttctagggctgaatggagaatgactcaggggctgagcccagggaaatctcttgtctttcttggtgacagtttcttctcctgtgctttgggataattggaaatttggagatgttatccatggatagtctcccattaactcctattcatttattggttgactttttaatagcagaagccagagtgacttttcagctttaagttgtactccattattaattagctgtaatcatggaagctcatcagcatttctccaaataattctctagtcatcctcagtaaaactatgatacaacttaattaggaaaagtataacagaggggaatttattgcttatgaactacctccctaatgacctgaaattacattgccatatggcaaatatcctctgcaaagctgcaaccaaacttgttggcagactttgtgattacatgttgacttgaactctaagattccatttctaaggatctgtaaggtcctgtagaacagggtccccaatccctgggccacacagcaggaggtgagtggtgggcaagggagcattagtgcctgagctctgcctcctgtcatatcagtggctgcattagattctaataagagtacgaacgctattgtgaactgtgcatgcgaaggatctaggttgcatgctccttatgagaatctaatgcctgatgatctgaggtggaacagtttcatcccgaaacctgccccaccaccccctggtccatggaaaaattatcttccacgaaactgatccctggtgccaaaaaggatggggaccgctgtaaaagaatactcatagatacctgcagaacatggcagtgtactagtgtttctagaacaggggttgttgcacttgacatgtaccttattaagaaatgggaagaagagaatgatctgtatgagttttttcaaaggattatttctaatacataattttcttattgttgccactatatatataatgcatagttttcttatatatctatagtggcagcaataagcaaattatgtattagaaatgatcctttgaaaaaataatatttttatacttatatatacatatatatacacatatgtacatatatacacacatatatacatatatatatacatgtacatatatatatacacacacacacacacacacacacacacacgcagtcgtgtgttgcttaacaattctgccaaatgcatcgttaggcaatttcatcattgtgcaagcctcatagtgtgtacccttacttaaacctggatggtggagcctgctacacacctaggctagatggtctagcctgttgctccgaggctacacacctgtacagcatgtgactgcactgaatactataggcagttgtaatacaatggctatgatgtcactaggtgataagaagtttcagttccattacaatttttggaccactgacatatacacagtctgtcattgaccaaaatgttattacgcagcacgtgactgtacttcaagatttctaaggagaacaaaaatggatctagaccttaaagctctagcagtttcctctaaataaaagtaagggaacaagaatatgtatatgtttgtatttctgtgtctggttttccctgaatattaataagtagttgatagtaggagtatattcaaatgtgtaacctgtatcctgtttatatcccatgactctttggaaatcatggcatagcgaaatcaaattttacatttgtaacattttattccataattgaatctaaactacacccgaccccctgctttggtcagtgtaaagcatagttgtagcttaaagctagaggaacagttttgcagataacgttccaggttgaataataaagtcttcagaaatagaagaattactcacctggaaaagtcaggactccaattagtactttgccctttttcagaacaatcacttcataaaagtccccacgtgcaaacatgtaatctgaactattaagtgctgtaattgataaggatccttcaaggtaagtgaaaagcgatgatgccgaatggcatttaaaaattactgtagcttgctgaattccaagtgtgtgccctctgtctttgctcacatcccaggatcagatgtttactgtgtgttgtggtcccaatttcccaggggatgtttttccatagacacaacagtttagaaaaatcaatgatttgtagacaatttgacttccattaagaaatgatgttggccgggcgtggtggctcacgcctgtaatcccagcactttgggaggtggaggcaggtgggtcacctgaggtcaggagttcgagaacaacctggccaacatggcaaaaccccgtctccactaaaaatataaaaattagccaggcatggttggggggcacctgtaatcccagctactggggaggctgaagcaggagaatggctggaacccgggaggcagaggttgcagtgagccgagatcgggccactgcattctagcttgggcgacacagtgagactccgtctcaaaaaaaaaaaaaaaaaaaaaaaaaaaaaaatgacgtttgtggttttttataccacaaatttagactggaaagtatgtgaacttttttactgttgttaatctgacagaacttttgtaaaatgtgtttctgtttgttaactataccgagtatatgactgtttttcaactctgacaacgattttttttttgagacagagtttcactcttgttgcccaggctggagtacaatggtgcaatctcggctcaccacaacctcctcctccagggttcaagcgattctcctgcttcagcctcccgagtagctgggattacaggcatgcaccaccacacccggctaattttttttgtattttttagtagagatggggtttctctatgttggtcaggctggtctccaactcccaacctcaggtgatcctcccgcctcggcctcccaaatggcctcccaaagtgctgggattacaggcatgagccaccacgcccggcttactctgacaactattaaataaaagattattttgtacagaattatttgatgttatttcgtatttcaatatgaaagtggccaaaacactttccatttttttttaaattttattattattatactttaagttttagtgtacatgtgcacaatgtgcaggttagttacatatgtatacatgtgccatgctggtgtgctgcacccaataactcgtcatttagaattaggtataactcctaatgctatccctcccccctccccccaccccacaagagaccccagagtgtgatgttccccttcctgtgtccatgtgttctcattgttcaattcccacctatgagtgagaacatgcggtgtttggttttttgtccttgcaatagtttactgagaatgatgatttccaatttcatccatgtccctacaaaggacatgaactcatccttttttatggctgcatagtattccatggtgtatatgtgccacattttcttaatccagtctatcattgttgggcatttgggttggttccaagtctttgctattgtgaatagtgccacaataaacatacgtgtgcatgtgtctttatagcagcatgatttatagtcctttgggtatatacccagtaatgggatggctgggtcaaatggtatttctagttctagatccctgaggatctagaagccacactgacttccacattggttgaactagtttacagtcccaccaacagtgtaaaagtgttcctatttctccacatcctctccaacacctgttgtttcctgactttttaatgattgccattctaactggtgtgagatggtatctcattgtggttttgatttgcatttctctgatggccagtgatggtgagcattttttcatgtgttttttggctgcataaatgtcttcttttgagaagtgtctgttcatgtccttcgcccactttttgatggggttgtttgtttttttcttttaaatttgtttgagttcattgtagattctggatattagccctttgtcagatgagtaggttgcaaaaattttctcccattttttaggttgccttttcactctgatggtagtttcttttgctgtgcagaagctctttagtttaattagatcccatttgtcaattttggcttttgttgccattgcttttggtgttttagacatgaagtccttgcccatgcctatgtcctgaatggtaatgcctaggttttcttctagggtttttatggttttaggtctaatgtttaagtctttaatccatcttgaattaatttttgtataaggtgtaaggaagggttccagtttcagctttctacatatggctagccagttttcccagcaccatttattaaatagggaatcctttccccattgcttgtttttctcaggtttgtcaaagatcaggtagttgtagatatgtggtgttatttctgagggctctgttctgttccattgatctatatctctgttttggtaccagtaccatgctgttttggttactgtagccttgtagtgtagtttgaagtcaggtagtgtgatgcctccagctttgttcttttggcttaggattgatttggcgatgcgggctcttttttggttctattttcttgagactatttccttttaacaagtactaattcaggttctcaaatttagccctttttggttgagtgagtcattttcatacaaaatcacacttactatcaacaccagtgacagtgagcatatagagcacaagcggaatgactgatccagaagagaaaaacaatagacatgttcagctcagaactctgaggacagagaccatcccaacccttttggattcgaaccacaaagaatctgtagaatcttctacactggagatgctgacctgcccaaggggctgctggctgccacgtgtccacgtctcagtaacagaagcagagaatgtgccccgattctctgtagttagctagaagggaacaatgacggctttggtacttctagcggagaatgttgtcttgccacttgtcacaaattcccactctgtggctttggaaaacacactacattttcctacactctcacacttctgtgaccagaagtgtgtgggtctctcccaccgcatcccattccctgacaccagctggatgtcctacaattcaattcaattctgacaccatctacctggagttagcatcagattctgcaaggaaaagggcttatctgaccttactcagatttcaccagtgttttacttattctctttccactgtggatcacaaaaaattttacaaatacagaaaagctgaaagaataatacaatggagccaggctcagtggctcatgcctgtaatcccagcactttgggaggtcgaagcagaaagatctattgagcccagaaattcaagaccagcctgtgccacatagtgagaccccatttctacaaaaaatataaaaaaatagccaggtatgatagcttatgcctgtagtctcagctacttgggaggctgaggcaggaggatcactttagcctaggagtttgaggctgcggtgagctaagattatgccactgcactccagcctgggtgatagcatgagaccctgtctcaaaaaaaaaaaaaaaaaaaggaaaccatgattcctgccacctcaattcatccgttgaaagcacgttggcatatttgcttccgtcatgtgtctccaagtgtctctatctatacagccaacccctttcagtcagtgagagacagggatgcacctgccctaagctgttcagcaaacgtctctggggactaaagacattctctattggtcatattgctccatgagaattcagcaacaacccctcatgccatttgtattcagatttcctccattctttccaaatttttttgtccttttcacgcattgcatttgatgattgtgtctctttaatctttctttttctaaaataaatccatcaccatcacactgttttattttcttttcatagcattgcttttcagtttttttgaagagaccaatccattagcttttgtagactatctcccattctggactttttttgtgctgccttgtaatatgcctttcgactggtttctttatccccctgtatgttctgcaaaccagaagcttgttctgagattcaagctcaactccttggcaagagtgtttcagcattgctgtcgaaagcttcctgctgtgttacttcaggaagtaacacaggaagtgggcttgtcatgctgacccactactggcgatgctgaatttcaccactgggttcaaagctggtaacttccagatccctccattgtgaaagtatgtacctcttcctacctttgcaattgtcagataatctttggataaaactttgaatccacaaaaatgtggccatgtcctatttccctaacaatccttcatcggatgggttgaaaatctgtggctggtccttgtccataatggttactcctttggctgagcagaatggaaatttcctaagtctaagagtgaagatgctttgtctttagtctaagagcattgggaagccattggggaaatgggttcagtgtgatgtctggaaagcattgatgccttgatgagatttgtcatttgaaaagtgaagcatggggacaagaaaggacaaggatggacctaagttgatggatttggagtcccctgtggcagtccaggtgcgagaggatggctgttttattctagtgggtgggcacagggatggaaaggtgcagacagaggtatgacacgattttgcctctgaagcagatggatggctgctattagagcagcctgcttattgtataagacatcctgtgaatagtcaaactaaaacatgcagccgggcacagtggcttacacctgtaatcccaacactttgggaggccgaggcaggaggattccttgagcccaggagttcaagaccagcctgggtaatatagcaagatgccatttctactaaaaataaaaaaactagccaggcatggtgatgcacacctgtggtcccaggatactcaggatactgaaacgggaggatcacttgggtcccagggttgaagctacagtgaactaagatcgtgccactgtactccagcctgggtgagggaatgaaataaataaataaaataaatagaaactaaaacaaaaaatgcaacaggaataaatccacattgaatgatgaaattttcacaaaatatcccttgttgacttggagaccctagtggaacagtccggtaagcctcatcagctgctcaaggcaaacacagttgttaggggccaccgccatggctagtgaattatgcagaaaacaaggacgccttgcagaacctcatctcccactagatgcagcattttgtttgatcagcaaagtaccaaaatttaacagctgagccatactaatgaagtatgggactgtgtctcttagaaaagaaagagaattgggaaaatatgcttctcttccagaataataaaaacgagaggctgtagctcaattattaggctttgagaagtaatcatcaagaaagccagcaatttcatgcaaatagagatgtgactgaattacggtactcagcctacaaaatatgcagcctggtcgttaaaatgggaaactcttgacaaagtgaggaaactcagtagtgaaatatgaatttcaataattaaactggaaaagaagccatttgttgtgtcggaagggaggactgggatgctcccgctcctgagagcaggtggacacagtgcccacgtacagagtttggaggacatctggactgacttttccaacttgattttgtctgggtcactaatgtctcctagactggaggcatctgctctaatagagtgatcaggatcactcattttatttatggtgggggcacaccaaactcctcacactacagacttcacctgctaggacctgactttgccattagagttggagagaaagtatcttaactttgaacattagcttgttagtgtcatcaattttaacttgtgcctctttgcaggagctgcttatttagaacttcgtactgggaattgctttcttggctgcttaaattctgttcaccaccttggccttcacagccattgcacctaattatgattcaggagattaaataaatgagaaatatccactcatttggcaatccctgaccatggcctcatttttctaagacagttctcggttgtcttttcatttcctaccttgagtgttgagtgagcttggggctaccagggatgtgtgctttttgggatagccacttgttttgttcaggttagctcagagcacctgtcaagctctggaaagtaggaaaccttctaattctgatagacacatactggagtccctaggaaccggctaccccttcctgatgtcaggcacattccatggaagcagggtagagcagctgggtgtgtacggaaccctgcttcttttcagttgccctgcgaagtacacagcatcatctaagacatcagaagcataactcggtagcttttggggatgtagctgccatctaggagagtttggcaacacggctgcacactcaaatggtttattgcatgccaaatctgtgcagatggtcaggagtacctgttggagcctttcgttttgaaattccgtaagagaaaggaacagacagtagtatcccgtattcaatctgatgtgtcctgttcatcatgaaaaattgatttagagcaaacataagaaaaagctgtaacctgcaagccttgtttgttaaaatcatgttttcctagaagcagaaagggcttgaatgcctattcctaacctttggggatttactctttaactattagagagacatgctcagggactgtttcagaatatattcttgaagaagccgtctcagacaggaggtgctcaggtaaacagaaagacaggtctaattcacagctcctatgaaatatatcttcattacttttcaggatgtgttcattcagcctttaaaatggggtattttataatctaattgacaggagggtatcatgtttacctttttctttgtgggccatttcagtgttttgtttttttatttcaggatttcctaatggaaacattcatcatgtttaagaacctcattggaaagaacgtttaccccttcgactgggtgatcatgaacatggtgcaaaataagtaagtgtggggaaaacggctctcaccttttctatggctcccaattcatgtctgctgggaacagtggtgttgcctggagaccaagctggcttcaataaaatgctctgcaaacgctgttcctaattctgtgctgcagacagttctagggagacagggactctgagtttgtggtgacttccttatgacaacacagggctctggctctaagaacttgagctccgtcccctggagaaaaacagcctgaagctggatctcccctagctgtcatcatgggcacaggggttctgctcgacgtcgctctgcgctctcatgttacccacatatttgtatcagccctaggcactgtcagctccatgcaagaggcttttgcaaagtgttgacatttcacatatttcagtttttttaatcatgagcattttcttcatactcattaaatattgaacttgtgccttgtttataatctccagtgagggctgttggttaattttctagcacattgggttttatcatttctgtaagcactaacaatgaccatagaattctcaatcacgtgggatttttaaaaagaactttctgttcatctctgtttttctttctcattgcaatttttatggagataattgtgggttcatgtgcagttgtaggaagtcatagagatcttgtgtataagggagtcgatgatgcgattcactgatcttactcagatttcctcagtttaatttgtattcattagtgtttgtgttgagttgtgtagtttcagcacatgcatatactgtggactccaccaccaccgtgaagccactgagtgtttccatcaccacaaatgttcctcttgttgcccaattatacccacatatacctctcccctccccactccaccatccgtaagctctctcgaccactcattcgttcttcatttgtataattgcttcatttcaaaaatgttacataagtgtaatcatacagtatataagctttcagcatggctgttttcactttgcttaattcactggagatccatttaggttgttgcctgtatcaatagcttattcctttttattgctgggtagtgtcccatggtacgcctggaccaagtgtgatgaaccattttcctgttgaaggacgtctgggctatccccagtttgtggctcttacgaataaagctgccaccagccttcgtgcatcagtttttgggtgaacatgagttcggttctgtggcataaatgccttcctggacaaatgctggcttgttgggtaattgcacatttcgtgacgtaggaaactgccaatctatggctgtaccattttacgttcccaccagccatgtaagtgattcggttgctccgcatccagcctttgccgttgacactgtttttgcttttagccatgctgataggtgtgtagtgtatctccctaggatgttaaattgaatttcctgtgatggctttgcctctctttaatgcctattgtccttcccttcgacaaatccaaagcagcacgacctttcctttggcctcctctgggtttttctgctttctggggcagcagagacagattggccttgtgtaccgtggctgcgggagtcctacaaacctccccgaggggtaagcatgagggagggagtgatgttcaccccgcgtcagatgttactgagctggaagtctccttccacacatcaaagatggcatctgagagtagatggtgaggaagccccggagaccctggcattgctgtagccttagctctggcccggggagcagagtgggggtcttgacctctgctcctcctcactcttccacctgctgggtgactttaaattattcctgtggccttctctcagcttctcagtcgtcatctagaaaatggtggacttaatagaaagcactggtcttttccctttttctctgttaggatgaacttttgtgattgacagtctagatttcctctgaagagctctagagcgttgtgtctttaatggctgtattttgcacatagtgaaaacaagcaaacacatcagcaacaataatcaaaaaccccgctgtcctggagccatagatctcatgacatcattggccaggagcagaggtgtggctgagcaggcgcctgagcacagggtgtggaggcggcccgtgtggatgctgctctccacctcttgactcctctacgtgtagacctgaccttctgggtctcccagcagagcagcacgtcctggctctcaggctgtggattccgtggccctgggtgagcactgctctgacaaaggtcaggcgggatgggctccctgaagttgcattcatgtcgctcctactccgagggtctcccgtttaggagggaatagtcaaaatctacttagttcatgattttttttttttttttttataattgagagcctgttttcagttggaacatcatagccgcatcattctctcttcctacttcactgtcttcctcctgccgccaaccctgcgctacgtaagggttgctgcagcactggccgtgatgcaaagccacacagtaagtggtctggggctcaaccctgggagtgctatggttctggtttccttctccagagaccctgtccagcttctcctgggatattctgttgtttctggggtgagcaggtggcttgatccacattccttggaatcatgaatttgctgcaaaccagtggcaaccttccctggccagcacccctactcactagagccccttcacagggtatggcgcctgacagaggtacccgcgctgcagcagcaggttggtacagtggcattttggaccaaagcctttgcgtcttagaaaccgggaagagagtcttttgttttgaggacagggaaactctggggagaagccacagtgctcagtgtcctctcagcagttgattggatgagacttctgaggataaagtctaccttggtgataataaagtccaccttgttctcttgttcatcgtgtacacggactgcagctggaaagacgtcttgacaagggaagcagcctgaatgtaaaatccctacagtttattttctgttttacataaaatgttatcctgaaccttctaatcaaggattccagtactgtgaggccaggtcgttgagcagtgtttcctccatgggagcttcctgcagagaagtgatgtgtgcctgtgtgtgtacccatgctcatctgtgtgtgtacctgcatgtgtgtgcatgtgggtgtgcgtgtgtgtacccgtgctcatctgtgtgtgtccctgcatgtgtgtgcatgtgggtgtgtgtgtactcgtgctcatctgtgtgtccttgcatgtgtgtgcgtgtgggtgtgcatgtgtgtacccgtgctcatctgtgtgtgtgcatgtgggtgtgtgtgtgtacccgtgctcatctgtgtgtccctgcatgtgtgtgcatgggtgtgcgtgtgtgtacccgtgctcatctgtgtgtgtgcatgtgtgtgtgtgtgtacccgtgctcatctgtgtacctgcacgtgtgtgcatgtgggtgtgtgtgtgtacccgtgctcatctgtgtgtgtgcatgtgggtgtgtgtgtgtgtacccgtgctcatgtgtgtgtacctgcatgtgtgtgcatgtgggtgtctgtatgtgtgtacccgtgctcatgtgtgtgtgcatgtgggtgtgtgtgtacctgtgctcatctgtgtgtgtacctgcatgtgtgtgcatgtgtgtgtgcctgcatgtgtgtgcgtgtgtacccgtgctcatctgtgtgtgtccctgcatgtgtgtgcatgcgggtgtgtgtgtgtacctgcatgtgtgtgcatgtgggtgtgcgtgtgtgtacctgcatgtgtgtgcatgtgggtgtgtgtgtgtgcctgcatgtgtgtgcatgtgggtgtgtgtgtgtgtgcctgcatgtgtgtgcatgtgggtgtgcgtgtgtgtacccgtgctcatctgtgtgtgtgcatgtgggtgtgtgtgtacctgcatgtgtgtgcatgtgggtgtgtgtgtacccatgctcatctgtgtgtgtacctgcatgtgtgtgcgtgtgtgtgtgcctgcatgtacccgtgctcatctgtgtgtgtgcatgtgggtgtgtgtgtacctgcatgtgtgtgcatgtgggtgtgtgtgtacccgtgctcatctgtgtgtgtacctgcatgtgtgtgcatgtgggtgtgtgcctgcatgtacccgtgctcatctgtgtgtgtgcatgtgtacctgcatgtgtgtgcatgtgggtgtgtgtgtacctgcatgtgtgtgcatgtgggtgtgcgtgtacctgcatgtgtgtgcatgtgggtgtgcgtgtgtgtacccgtgctcatctgtgtgtgtgcatgtgggtgtgtgtgtgtgtacctgcatgtgtgtgcatgtgggtgtgggtgtgtacctgcattgtgtgcatgtgggtgtgcgtgtgtgtacctgcatgtgggtgtgcgtgtgtgtacccgtgctcatctgtgtgtgtgcatgtgtgtgtgtacccgtgctcatctgtgtgcatgtgggtgtgtgtgtgtgtacccgtgctcctctgtgtgcatgtgggtgtgtgtgtgtacccatgctcatctgtttgtgtacctgcatgtgtgtgcatgtgtgtgtgtgtgtgtacctgtgctcttctgtgtgtgtgcatgtgggtgtgtgtgtgtacccgtgctcctctgtgtgcatgtgggtgtgtgtgtgtgtacccgtgctcgtctgtgtgtgtacctgtatgtgtgtgcatgtgggtgtgtgtgtgtgtgtacccgtgctcatctgtgtgtgtgcgtgtgtgtgtgtgtgtacccgtgctcatctgtgtgtgtacctgcatgtgtgtgcatgtggctgtgtgtgtgtacctgtgtgctgaggtgttggtttcaagtaaagacacttttatttgcagagattcttactctcagaagctcaaacaaacccatattcctatcccagttgacacattcagcagaaacaagctcccaagcccacacagcacaagagtcagccaccgaggaggcattttaggtcctgattggagttggtcactgataactgtaacttttattcccacatccttctgcccccatatgctgccctttgtgttgaataaacaacatgaatgtttagaagctggatcaggtgggtttttgaagaaggttattgccttcatgtggtaagatacttgaaactgtctggagacagcttgttgagagacccttaagtattctttgacacctttgcttcaataccagcttcaaaatgaagggtttgcatcactttccctgtacattcccattctttgtgaggcattgcacgtttgcgttctggagctgagagtgagctaacattgggcatgcctcccagcaccaggcactgctgtggggatgtcacgtgccatcacgtccttcataccctcagcagccctctgggacagctgctgtgtttaggcccactttacacatgggaaaattgaggcatggaggttgggtcacgtgccaaaagacagagagctgggcggtgttagtgccaaaatttaaccccagagcatccaccccagagccgtgcctgagccacctagctaccctgcctcttggtcttaagtaggtctcctatttcccaagagagtgttaggagtttttgttttgtctttattcgagtgtccataaaacataacaacttttccacaaggtttactgcttacgtgagtgaattttgagtgtggaattcattacattgctacttactttcttcacctttagaagtgtatgcaccatttatcaatgtgttttataagagcgaatcttactgtgcagtctagaaaaatcacgtctccctagcattgtcataaagtaatcctcttatggaaattgcagataccatattctatgtctttatctacctgccatatatgtgtatatatagattgcctcttactagattggtgatataacttgtaaatcaagaatcaaaattacaggatttaatgactatcccaaagtacggtgttcacttggttatgtccaagatgggaactgataggcgatggcctgacattatagctgtgctctaggatatgagagtaccagatggcaagatgacatttaagatgagcacagcacagaaacagtagaagtgtgcttttgtgctagcacccagaagtgctttataatcttcccagaggggagcagctgctaaggtttcactgaagctctcaggttctgttggaagcacagacctttccctgttggcacctacatgctggtatccatcctggaactcttattagctgacttgctcggattcacgctttgtgtgtgcagcatagtctaaatggccagcaatcataccatggctatcatagaattctccttggttgttaatgagaatgtgaccacttgcttgaatttttgtgtctcttctagtcttagggtttgccttcgtgctccagtagggtgcttgagtttatgtactaataacccctactagaattttaagtgataggaatgacctggtaggaagtgagtctgccaggtaaaccgaatccctttgtcacctcgaagaaaccgtttcttattaactgctttacttttgcttgagaaaggcatttctacaacatgtggtgggtgagagagaggccagtactgaatgtaattttccctattttggaattagactttcttgttcgtattgactacatagcgtgtaacaaaaccttatccacagttgtcagctactgagacttgtaacggaatttttaaaaattcaactactccagctcacagcttccctagtcctccctgcctactgtaccctctgctctcaggataataaagacatgaaaccagcatttgcatttcctcagagctagtgtagtttgcaactgtgattatcaatcgcttccaggcattcctctctgttggcataggttttgtgtttgagacttcctgttctttttcaggctaggctgggacctacgggaaataatgattagtgttttgaagcccacacactttcatagaggacttggtatgtcttgcaagtaaaggttcatataacatgaatataaaatagaatatgtaaaattgtagagaaaacgatgctttctagaagttgaaatactcaaagctgactgcaggataaaacataaaggcaaataagacggttgccgggttctcactggttggtgaaaatgatccttgccatttatcacgggaagctggcagtttacaatgtagattttttttttttccaagacagggtctcactctgttgtccaggctggagtgcagtggcaggatcatggctcactgcagcctttaactactgggttcaagcaatcctcccagctgagcttcccaggtagctgggactaccgacacataccaccgtgcccagctaattttttgtgggtttattttcttggagagatggggtttcgccatatggcgcaggctggtctcgaactcctgggctcaagtgatccacccgccttgtcctcccaaagtgctgggattacaggcatgagccaccacacccggccatgatgtagatctttatataggagacactgaacaggagaagatcatagggaaggaatcagttgagaattcaaaattctgcccatagaaaacagaagagattattctctcagttaggaaatgcgtaagatgttaccagtcagcatgttggttataacagtggttggttataattggacttgtctgaaagactagctcatcaaatgaaggggatttagctgacctgatccattcagtcttgtctagtcgttgaccatttcaacatcagagattgtcagtcaaaaactattgtttggttttgttctatctgcaatcaattaatcttatacttgtcctttcaaactttgaaatttcatcccgatttggagtttgtgagatcatgttgctatttatttccagtgtctgtgtgttacacattaaaaaaaaaaaatcatggccatatggagaccatcccaaacagatcaggatgatgcttgcagtctgcaaaggatggaggattttgatctcttgacctcattttgacaaccaccttggctcatttctctgtggcctctcctcctctccccatgattcatccttctttcaaccaggaagtgttttcctcaatccattgacgtagcatattacattttcaccagcctgccatatatgatgtctatggacacctcataatcacatgcagctcctttcatgaggaaaatcgtccatgcttatttctgtaacttaacaatttctccctttttaaatagaatgcatttcctcacttataagtattatctaccagatgtatcagagtccaggatggcaagctctctgctatttctgccaaaattaatttggcttatagtcaggacaggaaagggccttaagccctagaaagggattccaccttggagatgccagttccttaaggataagtcgtgttggtgctcagaaggcaaatttgcagggtaggctgtttgtaggtactttgccatttgctttcgttgccgtgaaggaatttgagtcgttgaccacactgagctgagggcttggatcaggggaaaggcaccgcttgccttaggatgggagagagggaaaaattagtgcccacgtgcagggggcctgcccccaggaccatggcaccagtggcaacctgtggatggccaagtcaggaggactgcgtgttttctttcctgttctacctccgtccagagaagcacctctgcatcccaattaagggtgcatagttgaatattctttgtgcaggttgaaatcatggttataaagcatttggggcttgagaaactcttggattattacttcttaacatcttttttcctttctttgaagcctggattttagttgatgttgtgacttctcatttaatttatttttaatatttattggcttactattgaggttttgcacagccaatggcttgatgattttaggcacactttagaattatttttttcctttgaaacagtatacagcagttgttgacagcaaaacacaactagctaagtaccaaaacacacacacacacacacacacacacatatatatagactgtactgactatacattttgctttgcactgagagatgtttcatgcataaaatagagagggcacttggctttggtcctcataacatgaagtgcctcctctggcattaagtgccagtggaatgtggcattaacgccagccaggtgctcacgatgagatgtgcatggtctctgagaatttggggtgaaaaaaatagcaattgaaactcagtatagtgaaaacattctggaatgaagatttccctagagttctccatacctgcattttactacagctcatgcacttaataatattgctctttgagccttcttcctctccaagaaaactggcctaacctgagacatttcacagcccagagtccccagtttgcaggcaccagggccacagttctccttcctaggctggttaacttgggctgtacctgagtgcatttctggcaagtcacccagagaaacacatgagacttttctgggggctgtgttggccattgtgatgcatcaggatttcaagacagatactgacttggatccagtaatgatgctctggaccctccagcaggaaaaggaccccactggggctacattgctatgtctatcattttagttttatctccagaggttgcttttagaggggacacagggacattggcagttctctctcagcagcttttgggcctagatatggttgcagatggtgtatcagagcccactgcaccttgggatggaaactgacctacgaccaaatgctacctgttcgagttctgttcattcttaaggcctagtcataaattatttcagatactttccataacagttattctatttcatgtctgcttttgctctttgcttaataactaaaacaaataatttccagagttttacctggttgtttataaccaatgtattgcacatagcctagatattttaaactgtgtcgtcttattcagattgcctgttttaaattttaattcagagatgaaaaatcaacctactctcaaaggagtggcagtgatgaagagctctcagcaggactcttatttagggaagcttgctttaaaggaaagtttgaaaagggcaaagtctgtttaagaattctcagagatcacgcgcacctcgtcgggagtgcctggctggtactgatgccgcatcccgctggcacttaatgccggaggaggcacttcatgttacgaggaccgaagccaagtgccctctctattttatgcatgaaacatctctccgcacaaagcaaaatggaggagatacactttattatgatcctcctcccggtcctctcatgctaagttttaacctcctgtgctactgggacttggaagaaggtctgtgcagtataggaccctctggtgtggtgcttttacgtctagaacaggaggaagaggcagccaagtgaactgagtcctcgcaggcttgccaggctgtgtcttccgtgtctttttgatagttctcaatgaaggacagttgtttcccctagaggaaaatcgacaatgtccagacacgttgttgtcacaacttgggaagagagggctgctggcatttagtgggtagaaaccagggatgctactaaacatcttttcatgcacgagacagccccctgccgcaaagagtcatttcatccataatgtcactagtgtctccatgtgatagatgaaaaaacagagtccagagtctcagtgatgctcagtaactgttagaaatacatagaaatatgtgtgcagtggctcatgcctgtaatcccagcactttgggaggccgagggagttcgagaccagcctgaccaatatggtgaaaccctgtctgtactaaaaatacaaaaaaaaatcagccaggcatggtggcatgtgcatgtagccccagctactcaggaggctgagacaggagaattccttcaacccaggaggcggaggttgcagtgagccgagatcgtgccactgcactccatccagcctgggtgacagaccgagactccacctcaaaaaaaaaaaaaaaaaaagaagaggaaagaaagaaagaaatatatgtgatttattgcagtgactctcttctccttgtttccccatttctcagccacccttctctgccatgtgacctcagccaaaccagcgccctctagaacaaataatagcagctagctgctgaagataggactggtcttcacttattaggggggtgtccgagaattggaggtggtttccccaagtcgctctgccaggggctccagtgtctttgcaggagatttttgtgggctttgatttggggtggtgtttgggagcaagatggcattggaatcacagtgacatgaatgtacatgccagggctgcctccagtcctgcctggcatgtgggacacacgttgaaaatattagcaagagcctgttctcagggtgcttgggctgccagcctctacaccccaattctgccgagcctggggtgaaagagtagccacaggcctttcctctctacctctcccagccagaggccaccttcagtacaagggttggaagctgagccctggagtcagtttgtcaggtcaaatccgtgctccaccacttatgagctttgtaaatttagtgttgggcagatttaccccgtgctgtagtttcttcacccgtaaattagagacagaagtcaagcctcgctggagtgttttgggggaataaatgagaaagcgcatgtggggtgctttgttcagagcctgacctccagtgaccttgcaacaagccatgtctgtgaccccctccatttttatgaagatgacatgatagtgtgtcattgtccctctgaatctgagaattgagcccacaggtaagggtgtgaagcatagacattgccctggagattcagagcactttgtacatgtattgagaaattacattataaaaaaatacaattctttgctttcatagattcactctcttcttgtgaggatatttgtatatattcaaattgcggtttcccttgatttataggtaattaagtcaacccattttgcttgctgttttcctagaagcagcatttgtgaattgctttatgtgacatggctgacactctgtcaagcataggtcttgtgcagttgtctctgttcagaagccagtcaccaaaatggtggtcctgtctgccctggcatcttggaaggacagagctgcagtccccagagaggatcctgtgttgtccctcatgtgcagatgaggttctgagattcaggggggttgaatgagtggctccgggccccctgtgtgagtagcaggagagactgcagaactggttgctcttaagccacatccaaggccaggcacataaaatgtggacagtgacgcccaccacccatgcagtccttgggaagccccgttggcataacgagaatagagagcttgacgaggaggtcctcagtgaatgaatgccagctcctgaccacgctcagttttggtaacagtaagtggcactgtctacagagcctctcaggaaccggggactccacctgcctcctctccttctcccaccctcagagccaatcatacacaggacccagtggataggactggagttccggaagccagctccccagcgcctcctccgagctgccatccttctctcctgtggcaggggtgtcttcctctgaaatcagtgtccatctcagtcctggccgcacctccacaggctcccgatgtctggcaagaaaagctaagcagggacttccaaacgtgtttgaacaaaactccaatgaagaaaaacatttccaatcactgctcgatgcacttcccacccccatcaaggtgtaactcagcgagaattccttactgtgcagagccctccgatgtttttattctgttctgttctgttctattccatcccatccattctatcccttttcacttaataagtaaataaatacaatttcacattcttcccattctattgatttcgtgctccactgaatgaatcacagctgatgccagcctgtgccacccagcacagaaaatgccacatggctgactttcctccctccctccctccctctcttccttccttccttcctctttcccagtgtccttgcctgtgtgtggcgtggtcattatttttcattttagccattctcatggatgtgcagtggtgtgtaggcaggggagctgtgtgtcttcagcttctgtaggagctgccaacttcctttccaacaagacttcagagaaggcttcactgctgtccagagttgttcattctacctttttacacgtccctgtcccccaagcagtgttcatgttgctatgcagcctcagtcatactttgtaacatcagactgatttttctttatccagtctggtggtgtgtagtgagattgtgttaaactcgcctttccttaatatctgattaggttgagcacatttttatttttgagaaattatcattattttctcttgtattcaagactcttgtcccttttttctatgcttaacaaaagttatatatgtgtgtatgtgtgtgtgtgtgtgtatgtatatatacacacacacacatatataaatgtatctgtgttctagataagatccttgggtcaggtatctgtgctgtagatatctttctccactcagtgactgcaggattttttttttgtcacttaatagtgttctttgttggatgacatttaaaatgtcttttgaagacacttgcagaaagaacctgaatggactcacctgctggtgactgtctgggtagcaaggctcagcatgcttgctatgtggaagcttcacgaaatgccgtttaaaaaataaaattatcttcaaaaccaaacatgcaattccaccattctttgtcaagctcctgctattttttcaacacgaaattggaaataaagttgaataatatactttctccatcttcaagaaagcctgactgtgatatacttaaatttttaaaaattcacttatgtaatacatcttcaggtctataaaaaaatgataatgtttaattgtaatttttccatggaaccgaaatgttaacagcattgtgacattttctatacattgtttttcatgcaagacccttctgtgtggcacttaatatttgtcatgtgcgattttgtgcatttgtgcatgggtctttggcactgggggggatatctcttctgaacatttcagtggctgcactgtacactgtcccattacccaacacacagtaggtgctcaacaggcagtgactgtgtaactgctgggctgaaagaaggtgtatccctaggaaatgttctaggaacaaagtgaaccaataaaatacatgaaatacttttgtagcagttcattttggagaataaaaggcagttactctttttatatttgagtccacaaagaaacaattgcagctataaatatgcagtgaacaaatacctcttattctctttaagatctattagccagagctaattccttaattgaatgttgttctaaatttaccaccaaaatgcatgagggcgatctgtgtttgtacgtttcagccaactgcatgacatcagttccatcacaactgcaggaggatggaggaaggctgctgtgcacgattacttgctgttttgtggtcaacctttcccataagacttcagagaaggtttttacttaatactgtacctgtcaaattcccagagctgcaagtaaattgaagatacaaattatgttgtaaagtgaaatattttgtgttattcgcgttattctgcagtttggttgatttaggaagaaaatgaactctgacagcttgatcttttcagttcagtggattctaatgtttcaaaacaaaagacctgcactgaagcctctttcctccatgctttggcagagacaccactgtgagctcttcttcatgctcaaacctcggcagctaccggctccatgtcatggacacacagagtcctaggaagagatagattctgctaaatgctaatgtttgtaaatataaatattaaccataccccgaaagggaaggagttcttttgctggctgactgaatgggtagcttttagcacctgccacttttctcaacatgcaatctattttttatagacagaaaaaatctctttttctagcttttctggtttgctgctgttgcctcagtgatattgcttgggatgcagaggtttggcaaagaggttggaggagcacccctgcattagtccgtgttcacgctgctgataaagacatacttgagactgggcaatttacaaaagaaagagtttattggacttacagttctatgtggcttgggaggcctcaccatcatggcagaaggtgaagggcatgtctcacacggtggcagacaagagaagagagcttgtgcatggaaactcttctttttaaaaccctcagatcttgtgagacattcactatcaagaggaacagcacgaaagacctgcccccatgattcaattacttcccaccaggtccctcccacaacatgtgggaattcaagatgagatttgggtggggacacaggtccctcccacaacacgtgggaattcaagatgagatttgggtggggacacagccaaaccatatcaaccacctttcctcttctgttctgtggttatgctagacggcctcaccttcttttcttattcttattcaggggaaaacactaaagtgaagtttcctgcaagagccagaaaatcctaagttaacaaattgaattctgcaactgagatgcagtgggtggatgtagggctgggctccttggaccgaggctgaaccataaatacctcccactttggtattgctttgaggagcttcccagcattcacccttcacccttttgctgtgtgccttcctttaccttagctaaggaagtctaggcagctgtgcaggatttgataggtggcagctttagctcagactctggaagttccctgctccctgctaactccaagctggctccttgcagctgtccccagtgtcccttggactatggggccaggcatctgatttgattcttcaaactgaatgttactgcttctactttatttaagtaaatggccatctcattgccatctgatgctgtagcatactgtgcgaaaggtattttgaattagctgttagcagctgggtgcggtggctcacacctgtaatcccagcattttgggaggctgaggtggccagattgcctgagctcagaagcttgagacaagcctgggcaacacgacgcaaccccatctctactaaaagtaaaaaaagttagccgggtgcgatggcaggcacctgtagtccagctacttgggaggctgagacaggagaattgcttcaacctgggtcgcagaggttgcagtgagcggagattgcgccgctgcactccagcctgggttacagaggagactgtctcaaaaaaaaaaaaaaatagctattagcctgcagatgatttggatatgggacctaaaaagcaagctgattaattgatagatgtatttatttatgatattcagcctgagaattaagctggatttagaataaagtgtttcttatgagatacgcttgggggtaaacatgatctgcatgtaattcacaggtcctggcatttcagagcagtattcaaatgcatgtctgccatggactgtgagctcccaaaaaaagtgcatgatgaagtgagtttcgaatactgacagaaacggtagagaaagggcatgtcctggtcctggctaccgttgatattctgcttggagcttggatttggggttgtgttttagcttaaagaaaccatatatacctccaatgagaaagagacttttgggtgaagagggactggagggaacccatggaacagaacaaaggctgggcttacggtgatagcccgcattcatttagagatggaaagttgctggaaactttaaaacagagcactgctgtcactgcctgatgtttttcagggactgtttgggccactgtgcagagcacagggagtaggagatttgtgtgcaaactggagggccagcgagagccctggggataagctacaccagcgatggccatgtctttggctaaggtagtcattgggaagagggaaacaatgagagatttggggcatgttttgcaggccacatgaacctgtacaaactagatgtaagaagtgaagaaaaatgaacaatcaaggaaaagtcttaatatttttggcttgagccaaaagtgattggtggaaagtttaaagataaagaagcgggcttgcgaggtgggagtgttcccgagctctgttttggcctagcgcagtgtttctcaaccctgtttattttttttcccattatgaccctcctaaggagagaagtaaattcactttaattaagaagagaaatttaatgctaaggaataagaatttgtggggtagggtgtgctttggaggaccacaagcagaataatatctaaaatgttctttaccctcctcccaagaatcaatttcacccccttagtggagatgtttcccccagtgtggatgtgtggcctggttaattctcaggtgcccaggaggtggcccaatagagaagtttagctagcaactggaaattctacactgacgttcagaagaaaggtaaggctagaaggtacaatttgggatttagatgatgatattcaggccacctggggggcagtgtctctagggaagagaagccgacccaggctaatgcctcagggctctttgatatctaggggtttagcagtggaagataagtcagcaaaggagaccaagagcaggagtcagtaataggaagaaaaaaaaaaacacaggagagagaagacagtgctgaatttctgagagagagcatagaaattaacagagaagtaaccaaaggatttggccacatagtggtcactgctcccatggaccagagctgcctcagtggagtggagtggcagaggaggaggccagcctgctgtgcggcatggaggaaggcatggaaggaggtaggcaccctggctgtgggcgttcattgggttttcatggcgctcagggtcagacagatggtgtgtcgggagctgtgataccaggagagtttgtaggaatttgctgttgatttagggcatgttgggaacactggtggagatgagcggatgatgggtgaaggtggaaacgctgggatggaggaggttcatgagggcaatgagttctagatgaaagggatggtacaggaggggctggcctggagaggagcaaggtcaggtgatttgttgcaacaggagaggacagagggaggtacaggtgtcaacctgtgtgtagatgtaggtggtggttggatgatggaaaaaaacccatgtgacttctgctttcctactgcagaatgaagtcaggtaattagtgagaaggggtgcagagaatagtcaaatattatgatctctatatctctgtgatggccatattaatatttcacctttcaccaatttccccgctaatgcccacgcatggcgtacaggccgcgttggagatccctgcggctcatgctgccttattacgtaatgccctggagaggcctcacaagtagaagagtctaaaacgatagattgctttaaataactcatgctaaatcatcctcctgtgaacatttctcgatggatcttgtcttttaagcttcaacaaaccctattagccatcaaaatcctccagtctctcaaaatagccctcatcagacttgctcccacatgcttgcgtcatggctgggtggccactggagaggttgggtggagatgctggctgtgtacataggaaccagagcccctagagagatgacttgtgtctgagcaccattcttaaagctttccaatacatgggctgtcagtggctgtatgcatcttctctgtttgacttggcttagggatatttgggaggggacaggggggacaggcagcattaagcatccttttgctggtcctctgtctttgagtgcagttctgtgatactcagatgtcttccagaactatcggctgtttgattgtggaaattcctggaagacaagggctcctgttccttctctcgccacccgtgctttttgtctttctcaccctctgttcctttaagaccacaaagcagggactcggacactggtgacacggacatttcaggctctagctgtgggacgcttcaggcaggcagcctgatcttttttccattttgtttagaggtatagattgtacacctctgctccgagctcctttatcaggccccagaaatcatggatgcagcaaaaattttgaaaatgaaatttttcctatattatcccaattactctttggtctccatgaagccattgtttttccaattcctctattgcagaatgcatgcagggaatttagaaatcacatggtaaacgttatgggccatttcctattgctgactttaccttcctagttcctcagagatgtaagatgaatgtccctggtgccagtgagcagccagtcagtgtgcacagagctggaaaaactaatagactagatgcatcttactgatcacgttgatgtggaggggcctcatctctctggtccagctggaaatgtgattgctgcctggggtggccatgactaagggattcctgtctcagctgcctctatatggagaactgagctgaactggtaaacgctcagtttccctttcagaaaagaatgttactctcaagagcagcagtgattcaaatggccttttgactttaaaaaattctccatttaaaaatgtagaagcattttatcctatacaattataaacattattggtagctaataaaaaattttgatgaggcagcagatcattaagaaaatacatatagaccttgcacacttcattttgacttccaatagataaatagatccatttcacaaagcatgtgcatttgtcaggttgctttttcttggttttgtttttttatttgacttaagataggtctatagatgagtgtttgccttcgttttctgtgagccagttttcatacctttaaagttgaataagggctgggcatggtggctcacacttgtaatcccagcactttgggaggccgaggcaggtggatcacctgaggtcaggagttcgagaccaggctgaccaatatggtgaaacctcgtctctactaaaaaatacaaaaaattattagctgggtgtggtggcgggcacctgtaatcactgctactggggaggctgaggcaggagaatcgcttgaacctgggacgcagaggttgcagtaagccagaactgtaccacggtactccagcctgggtgacagagcgagactccatctcaaaaaaagaactgaagacaatcgatgaaacgatttgaacgctttttagatttagtgagtcttttaagttgtctctcacccatctgacttgacagcagtttttcaagtgagtcatctttttaatcttttcaaatctttagaattcgttttcatgtaaaagtcaactttcttttcatagccctattttatataatatttcattaaaacagttataataacagatttatttggtataaagcaggtatggagcacgcacacagctgtgtccactcactaatccatgcgcacacgcttccctcttagctgtagacaccacatgatcacatcactaggggagctattcagtggaaccccatgctgtccttgttaggtggatttttaaacactctgttaaactaaaaaagtatattctcactggccagtgtccagtgtaagcaaatttgcacatggctgtcccttgagtcactgtagttaccttttaaaaggaaagagagggaaactccattgtgtagatctttccccagccaagagaccgttagcatgcggtacagtaaggcagccactcattaactgtttgtttacctggcaaagagggcaggttggtgagctcccaggtcctcagaaaatgagactaagttttattaagatctgaggggaaaaaaataaaccaagcagaactagaattcactggaccagaaggttttgttctcccttttccagctaatctctctcatccaatctgagagaattaagcaagggtgagggagttgcagctggctgaattcaggaagttaccaaagaaggctgatttaactgaaaagacatatattcttcccaaagcccaggctattgagccagagtacctgatcacccagcaaagcaccactcaggctgtgaggctggccacgcacagggaggcaaagagaggaggagagaggaacttaactttgtttttcttcaaaaagatgtgttgtttcttggcaaaatgtaatcaccattgttagcaaacccatgagatgctctcagcaatgtttatcaaatagaaagagcttccttctgtgtgacaagcaggggatcagagtgacagtgtttagatctgttacttacaaggtgataggggcaaaaattaatacctgcacaggctgactcctgaagtcttcatcaccagaaatgccagcatgatgtccaggccctaaggtgcctaccatgtccccatgagagacacacagtgccatgaacagtctgggttttccagaaatacttgatttggttaattgacaaattctgttgttcctcctttatagttaattaataattttccagtgtagcgtttcctatcagggggtgtgaatccacacacgtggctttttcacaataaaatagcattcatggtgccttaaaacagcttgaaatgccccaaattactagacttgtaggtggatttctcacaaattattattaaaggtaatgaaaatcaaaatcaaagcatttcatatttattgtgtctttagggcaggccatactttacaagtaccattttaagaaatcctctcaatagccataagagggcaggtcatatgatctttatttttcagttgaggaagctgaaggcaatactgatttagtatctcacacaaggtcacatggctaataaggcagagaagaatcagctttgcttgactccagagtccgtgttctgtatagacaaaggcatgaggtcatccaataaggtaatcgcttggagaaacatttttccctacttgttttgatgtagaacttctgtaccaattgtaaccctctgccggttgagtaaatatttggggttaaatataaagctgaaattcaaataaagaaacatgttactgttctctacagggctggtcctcaccttttcacaacgcactttggaaaaccagcacagaacaaaggcccctcccagcctggtgtattcagacctcagtgctttgcctgggctgcagctctgttgggaaaaggtggcagttcagttcccgaggctggtgccctcggcaagaatgggagagcctggtaatttataaaggattatcacatgcaaaggcaatgtttgttttattccatcatctctcattctttcaaagcagtggcgttttcttagtatcgccatgtaatagagttcgagaaaagtgaccttaaaattgaggcaagtgtcacactttgagaatgcattaatttttttaaagacattttagtggttttaaaattttatttcatatatatatatatatatatatataatttttttttttttttttgagacggagtctcgctctgtcgcccaggctggagtgcagcggcgcgatctcggctcactgcaagctccgcctcccgggttcacgccattctcctgcctcagcctcccgagtagctgggactacaggcacccgccaccgcacccggctaattttttgtatttttagtagagacggggtttcaccgttttagccgggatggtctccatctcctgacctcgtgatccgcccgcctcggcctcccaaagtgctgggattacaggcgtgagccaccgcgcccggccttcatatatttttatgttgtaaaaaggggaaacctttgttctttgagtaaaatgccctggtagtgaacattttttaaggttttttttattttgacagacatacccacatttcacgcagcatcatgcttacccattcacctcatcttgcattcagagagctctcaggcacttgcaaaattgaaggccagaatgaagggagctcagtcatccttgacaactgctggggacaaagttggcaatttgttcattgttcttgcaagcacttagcctcttgccgagcactttaacatcagagaattctgggcatagatcagaaatcagtggctgcagaggcaagctacgtgcaggtaagttaagggcttactatagaaatgcaaaatgccaccattcttcactgtgttctgagaggtttcatactgttgtcgacacctgtgctggtgtagaattgcagatctctttctgtcttttttttgttgtttttctccttttcattttttcattttttactccacgctaagaacatcggaatattttcaactttaccattggtaaaatagtgcaaaggaagtgaagatcacgtcagcccatggtccatattttattccttgagttagcaaatcaccaacactatttagtttagcgagttactcctttggaatttacagtaaagccatatttaatatatttccatttagcaagtatttgttttaaataacagccttggcttccttgtttggtttgtgagggagactttgcttctgtgtttccaacgtggctggaagtggaggctccagggctttgcctcactcatacagttttatttttaaattgaaaagtggatttgtttaacatcctccaagaagcaaactcataaagctcgggctttcctaaaatgcattgccaaaatcataattggtagaaagttagcaagaaagaaggattagctcatcgagccgtggcctagcaaattgtaatgggctcaagtagttttgtggcttgttgagaaaatgatacagagtttaggaagcagaaggacacagcaatgacacaggagagcctcacaaacaacaaacactgcctttgccaggagaattgggaatgggaccattcttgaccttcctggaagaactcagaaggacgtttcactccaggaggcatcaggagggaagtctttcattgttttcaaggaatctgttgtccctgggagtgggtcacaagtgctgcacacacacttggtgtctctgaaggagcctcaccacatattagagatgaggttcctccttgcctcaggaccccatgcctcattggcattgctgcagggagaccccaggggcttgtggcagtcagaggtcagcagaagacacgcagggttgatctgtgctcatggactctgatctcacatcaagagccaggttccttttgaccgggatgatttgagaaatggtgggagcagggcagttatcaattcagatgagtagatgctgacttagctctgtacagctccctggcaccacccatggtacagggaggcagggattaggagaatgctggcctccctgtaggtcagtgatgttgcatcagtactgggattaggctggggtgtccaatcttttggcttcatgttggaagtattgtcttgggccacacaataaataaatacactaatactacaatagctggtaaactaataaaaagatctgtgcataaatctcatgttttaagagtttacgaatttgtgttgggctgcattcaaagccatcctgggccacatgtgacctgtgggttgcgggttggacaagcttggattagaggacagaagaacttgcagctttcagcttggttggttgcttgggtaagggtgcactcttgtgttctctctctctctttctctctctctctctctgtctgtctcttttctctctctctctctctctgtctctcatctctcactctgaaagaagtcctgttgggggagtcccaaaagctaaaccattggcctgggggagaaacgtgtgctggatggaaaagaggacaaaggcatagacttgttgacttgcatctccgaggtcctgtgatgtggccaggtggcctgcagctcacctgagagacacaggcaggatttcctctcgctttagaaattgagcagcctgcttggagcaggcttgttctcagattcattgacacttctgcccatcagggtgatctgcaggaatgaaaagtggttagaattctgttgcaaaggttaattttaaaaggccagtgaacacccacaagggggtcaccagggcaaaaccacagcacacacccgcctctccgtttaactcacactagtccaggtgctctgcctgctcttacctgcttttcctcttggttgggtaacaagcattcagttgactgcatattctcctccctcagtttcttctgacatcttcgtgagacctgagagcaagctctgccttggcgacaaccagttgtcatttcttagtggcagcctttatttttcaaaaaatgaagaaggataggcagtctctgcagagtgatagtggggagctgccagaggggcagcagggtcctgcgtgtatcctaccaactgtgtttccattctcttttctcccaccacagaagaacaagtaagcgtagagctgacagggaaaggtctccccaccagggctgtctgtcctgagagtttagaatgtgctgggagagcagagcattctttggggcctgtttggcgccaacaaggagcgttacgtggtctgtgaccagctgctgcacctcctgctttgctctggaaggaggccttgaaggccagttggaagttctgctcggctgccttgaataatgaaccatcaattctgtttcccagctgtgcttccacaccctcactcttggatgggactgctgggttccttgtctgccacaagcagcaattgctggaagtagcaggtcagaaatgggaaaggaggcctggactgcatagccaggcaagccagtgaggttggagcaaacccttgaacaggggctgggcccacctttgtagtcttgtcaccaaggaggttactgaagcctccagaaggcacactgtctgatccaactcacatgccagaggaacactgaatagtttccttccgatgcattacattcattagttatagaaggaataaagccatcctatatcttctctgaaaaatgaaggagtgaaaagagcacaatgtaatcctattatggttgcaactcttcccagtttggttttctgcagatctatttacatgcatactttattctttcataatcatggtgtaatatcatctgtgtactgcattattttacttaccattctatcacaagcatttttccatgttactccagcattttcattgccaactttcttattggctgcatgagagtctatccagtgggtataccataacttgtcagtacattgtatcattttcataaatttaggttgctctcaagttgtatctgttgcagataacattgtagtgagtgtcttcatgcatatggtttctatattttgcattatttcctaggacacattcccagaagtcggattactggggctcgatacacattgtcaaattgctttccaaaaggattttactgattttattgcactctcgccagaattcaatattgtcttttaaaaaaattgttaatgtaatggcaaaatgttgttttatttttactgaattttcatgtcttcagtgatttgcaagataaaacagttcccagccattttctttccaaatgtagtttctgtttttgtaaactatttacatcctttgctcattaatctattggttttagtgttttttcttgagaactgtcttaacattgttatactatgctcatagtaacctatttcatatttccagttattttttctgtggtggtgtttgcccatctcattcggttaggtttttaaaaatttgtttttattattttacatacaaatatttaatttatatctttccatcttttttaatgatttctctgtaatagcaccctccctctataaatttgatagaccattttaggttttattattttatattaaactttttgtttgtctagaatttaatgctttgtattaaatgcatgtaagttgattttttaaattgcaactagttattacagcaccatttattaaataattcttcatagtttaaaagtggttcttccagttaaggttttaacataatgttagggataatttctgggcaatttgttgcttcaataataacatgtttggccaagcacagtggctcatgcctgtaatcccaacactttggaaagccagagtgggaagatcacttgagggcaggatttcgaagttatggtgaggtattatcatgtcactgcactccagccagggtgaaaaagtcagaccctgtctctaaataacagtaatcatcatcatcaccttttattcttgggttagtaccacattgttttaattaccatttctttatggtgtgttttagatatttggcatcggccaggtgcggtggctcacgcttgtaatcccagcactttaggaagctgagacaggtggattgcttgagcccaaaagttcaaaactagactgggcaatatagtcagaccttgtctctacaaaaaaaaaatttaaaaattagctgggtgaggtggtgtgccccctgtaatcccagctactctggagggtgaggcaggaggattgcttgagcccaggaggtcgaggctgcagtgagtcgtgatcgtgccactgcactccagcctgggcgacagagtgagaacctgtcaacataaataataaatcaatatctggcagcccttctctgttttactattcattttctgatttttcttctgtagtttaacctattgttctaccaaatgtaatttaaaatcattctgtgaaatccagcaaaaatagctttttattttaattttgattagatttgcattagagctcagtattaaaacatgcacaccttttggtgccagatttcatactcaacatactttgttccttttgtgcgaaggaaattatgtttattatggaaaacagtgaaagatgagaagtaaatggctcatcctccataaatggccatcgctgactgtttcatgtagaactttctggcctgtgcccatatcttctctcttcaggctttggcagtggggctgatacttcacaggctgttccagtaccactgcaccttcactctggaggtgggagtgggactccgtgctgaggaccctagatgcacatctgttcccttagcagggagccatgtccagagagtgaggcatgcagggagtggtcatgtggaaggtgcggtcagaccgccaaggtcatgccatcttctgggcactggtagtccctatggagctgctgctggccagtgggaagatttggaggatttgaggatactcttcagagtgtgcttccacagtctaaccctcctgcttgacgacctgttatgtgtgagatggtggctttgtcacaggaatcacctgaaagacctctatctgggctccgtgaaactacctaagcaggtcagtctttcagtgaactgatctgatatcattgggctatcacgagcctgaggctggctccccactttcaaatcatcctcaaaaggcagggcaagtgttttcctctggttggtgatggtgtcctagcatgccctttttccagctggcttcccactgggctcagcccgatgcgtctactgcaatccccctttcctgtgttgccctcggataactccatgtgtaggcctgaatcgtgttcatttccaggaaaagtaaatgatgcatatcttactttccatctgtggtcattttttttctgcttgagaaacacctgggtctgcttgtttttgaattctctttttgtttgtctgaaaaagaaatctattttatttcaaaaattcaatattgaaggataattcagatttagaatttgaggctagcagttgatttctttcagcacttcaaagataattattgcaccatcttttagctttcattgtttctgttgaaggtaacatatctttttctccagtggagatataatctcagtgctttttcgtctttgtttttaaactttttattatcaaaactttcatacatgtacagaagtagaatagtagttatactattactattatattatgtagtatatactacagctctgttttaaccatcgttcacctttaccactgtcaaccatagctaagtttcttagatttatcatcccagctttgtctttctcaccattatgttgaagcaaatcttaggcattatatcatgtcgttcataaatatttcagttgtcattcaaaaatatctcttaaaaataagaattttttaacacctctatattattactccttagaaaatgttgttttatacatagttcctatagtttgcccaacttagtatctaaacaaggtaaaaatattgcctttggttgttatatctagtaagtttccgataatctttaggttgacacccctactttttttctttttttttttctttttgtttttttttgagagagagtcttgctctgtcgcccaggctggagtgcagtggcacaatctcggctcactgcaagttccacctcctgggttcatgccgttctcctgcctcagcctcctgggttcatgccgttctcctgcctcagcctcctgagtggctgggactacaagcacctgccaccaagcccagctaattttttgtatttttagtagaggctggttttcactgtgttagccaggatggtcttgatctcctgacctcgtgatctgcctgccttagcctcccaaagtgctgggattacaggcatgagccactgcgcctggccttttttttttttgaagtacatgatctcactctgttgtccaagctggagtgcagtgatgtgatcatagctcactgcagcctcgaactcttgggctcaagcaatcctcctgaatagctaggactataggtgtgcaccaccatgcccagctaatttttagtttttttgtatagctgcaatctcaccatgttggccaggctgctcttgaactcctggcttcaagcgatcctcccacctcagcctcccaaaatgctaggattacaggaatgagccactgcaccaggctccccattttttttccttataatttatattgcaatgtttgttcaagttctgtaggaaattccacattctggattttgcagattgaatccacatggtgttatttaacgtgttcctctgtctgctatacttttgtaaactgatagatctacagactcagtgagattcaggttttgtttgtttgtatgtttgttgttgttttttagcaagaatacctgataagtggtgtggtgttcttcccattgcatcacaccagcaagcacatcatgtttttctgtctcttataacgtgaagattgattagtggcatcaggtgctgccagcatttatccagattccttcaatatacagtagtttttcacctaattgttatggcagccaatgatgatcattgactagacccattattcctttggagttaaaaaaatccttactctaattatgttattctgtctgctttcattagccagaattctttcataagatggaaacttttttcataaaatagatggtaccctgagagtgtttattaaaggaaaggaaggataaatgcttgtctctttcattttaattatctatttgctaaatagtgaattggttccctggcatcctccaaggatgaccagtaaatttttttctttaataccttcatgaattttcatgtgtctaagtccgttgtagttatgattctttttgctgaacaaattcttccatcttgttccactaggagtcttttcaggtggattcctgggtccttaccaccctgcttaagtagtctttgataatggctttctttttgatgtgacaaaatatctcaggttgatcttttacattttccatcccaaacctggaataagccaagaatatatagttgcttttagtgggaagtggtatttagaaatcataatctggacaacgagggtgctcactgcaactgagttactcattctttccaagccttttagtgggcagagctaggaaatacattttcttttttttaattctcttttccctgcaccaggatgtaaagtaaggaaatacattttccataggaaaaaaaatcaacatgaattcatactatatttgcatttccaatttaggattatggagattttagttaccttctttgattttatatgtgtaatttgtctcttacactgaaaatttgggtccctaatgacacaaacatgatgtcttgttgctttgtatgtatatataaaatatataataatttgtaatatacagcataatatagaatacatagtatatactatactatgtatatatttcacacacacacacacacacacacacacacacacataaaatagtttcagaataacaataccaattgttactttaaaagtttgttttctccttaggatatatcctgcagacatacacaatcaagtcatgtttctcaggcacttgagatgaatccttgcatgtagctaaactcatcaatttgatatttaggataattttattttgtttttgatttttagtgattgcacttttttatttagaataatgtgtctcagatatactaagcaagtgttttcatagtattttcacttctgcccctacctttccctacaggaaaccacttttattcatttgttgtttatatattgtaacttaacttttaatatcagtaaatacacaccacacaaacacgcacacacagatgcgtgcaaacacatacttgtattcccatccctttcttattaaatgggaacatcaatactgctttttaaatctaactttgtattctggagactggcgtgttgtagtatatagagatatttctcatcactttttaccactgtgcagattccattgcatgcatattcatattttcttgcacctgtcctctaataatgggcgtgtgatggtttttcatcttttactgttatagatggtgcttcatctatagcctcatgcacacaactttacatggttttgccagtgtgtcttcatgatagattctttgcagtgggttgatgtaattggaaggcaaatgcatatgacaattttggtaaataatactcaattgaatgccataaggttattgaattgtaacatctcaccagaaataaacgagcctgcttatttctccacaacctttccaacctattatgttgccagacttttgtacctttgaaaatttatcacatgagaaatggcatctgagtgcagttttatagatctcaatgtatgttttttggtttgtttctatactgcttagagtttataatattttggaaaattctcagacagtatctccgttatcattacttctacctcattccctttctcttcttcttttggaactcaattacagatttgttagaccttaggcccacatcacatacatgtcttatgctttttttttttttactttatttttcattcattttctctctgtattttattctagctatatatttctgatatattttttacttttgtatttctttcttctgtcctataatctgctggtaaattcatgcatttttgttctctgtttctgttatggagttttcatttggttatttttgctaattggaaactaaaatttcctattcagtcttttggtcccttaaagactcttggtggttctgtttccgtggatgtgtttctgttgagttttttgggaagaagtcagtcttgttttatgatcacgtcctggtttctggtatgcctggattttcctgaaatgaatgctgtagatcatatgtaaaagatatacagacttaattgaaggtacgatgatgttatcttactccagatagtgtttatttttttccataatttcctgtgtttttatgttgtgtatatttgtttaataccatgaaactccttttctgtgatattcaaaatgaaggtcgtggtagttttgagtggaaggcagttttgtattgtgtttttaaaactttattttccagcaattaaagatgtccacagttatgagaaataatacaaagagatcctgtagcgccttctctcagtttcctctagtggtaatatctggcataactgtaatatatcacaaccaagaacttgtgtcactcttttataggtcaagcctcttttctcctcctcgccctaccccgtttctgacaaccactaatgccttctttatctgcgtaactttttcaccgtatgaatgttacataaatgggctcatacagtaggtaaccttttgagactggcttcttttccactcagcataattcccttgaggtccatccaggttgttgtatatagcaatagtttgttccttttattactgagtagtatcccataatatggatatagcataattattttcaaccatacaaggccatttgggttgtttctagttttgggttattttgcataaagctgctttgaacatttgtgtgcagttttttgtgtgtgcacaaaagtttttatttctctgagttaaatgcccaggagtgcagttgctagatcccatggtaattgcatgtttagttttgtaaacgtctgggaggcaggactttaaggttgctggggcctcagggatgcataggacagctggggctttgcatcctcgactgcttcagctgaagacacagtctagagtctgtgtactctggcttaggttgagattgggaagacatcccttgttctcacttccagccctctcacttcagtcaagacttttgcttacaaagggcagcacagaggctcaccgtgcttaagtgtcacgtggatttactggacagaccatttgcacacatgtgaggcaagtggtatcgaattttacctggtagcaggtgccagcttccttcctgcatgccctgtcccctttatcctcaaagcaggcagagaatatggccacttggcattctcagtctcagcccccacaaccccacccccagacagagatgtacactagccccttcatttgagttccagatgtcctaaggcagaactctgaatgtccctttgggtcctatgtctagttctgtccctggtggccagtgccagagtcttacagcacagccccatgtgttgggagcgccagctttggggtaattgtcatagacagtagcgccctgtcgggtcagttccgtgtgagaacctgagagggaaggagagttgctcacggtcagacaggagctctcatcagcagctgagcctgcatccccaggcgtttgcctccttcctttggttttgctgatttcgcttccttgtggggagacagagctcggcctttctgctctcctgttgcgctggctgtgtactgtttattatagcctacgtagagagaatagagggacagacagcatttctggtgacagggcatatccagtgaaatgcagacataaatcatcttttaaacaagggtgggtttgcggtaggaaggcctgtgtgaggaaataggccctctctgggctccctccgtccttcacagagtgcctcctgacccagggtcgcaagccaggttctgtgccaggcaccactccagagcaggtatctgtggcttgacaaggatgcacagggcagccgatccttggaaagtctgtgtgtccaaagtgcctctggttatatttcaaggacctgcctgagctgagtcacagttagcctctgacaatatttctaatagaccactctgttgttggacagtttttaccatttgcacttccagtatgaccactccaggtctctgcattaatttttctttttaaatcctctgttttaatgttttcgggggagggggggcccacttctatctgaaaatgcccatccagacactgtgggttctgtgccaatgccagggaaggaagctcagggttctgccctgggccctaagaccttagtgactcaggcagccctgctactggttgggagcgctctccactggccacctctgctgcaaagctcttttctcttgcttcatgagaagtggaagagtgtgaaacagtacacggaggcctttctggctgtttacaagggagatgggccaccagtgtttgtcaccggagcttcagggtagcatgcctaggagaggagcaaacaggggccttggggctgtggagtcatgctgggaagatgaagaaaagacagttggtaactgacaaattgcaggtgtgatcattactctctgtgactccctgtttctcagatgcactgttgcttacatctttgtatgcttttgcattcctgctgattgattcaaggtgcaacgtgcctgcttgtcaggtatgctgttgatcacattatttaagaagaaataaagtcgttcccgcagctccacctgcagtgatgggctttaatgttttgtgcttcccgaggaaaacctgccgatgatgtgaagtgacattcaacccgccgagagctgatactggcagacaaatttcatgtcctgtctcctgatcaccagtttgctgcctccaagttgttagggatattaaaaacaggggtgggaagtccccacttgacaggttcaatttgtaatgtgaaaggtgctgagaaacaaagcaaggacccaggcagctttctgccaaggctgctggccccacactcagcaaggcaaagagaaaggggatctatctgctagtagcatgagtgtgggagaggagggggctgttgtagggtgccgtggaggactcatacatgatcctgggaagagcgctgctgctagcccagggccacaaagcgtcaaggacgttgagctcctgtgcatgctcctgtagccttgtgtcatctgaagaagcacagaagtggcaggaatggccttttcatagggcatgggatgctgtaactgatgtgcaatctgttatctcaaaggagaccttagcacaagtgggaaaggaaaaactgcccgaccatggagagaacacaagtgggctgagtgtagctgcctctccttacctgtggctggtgccatgaaggagtgctgctgtcattggacactgtggggccagcaccgggttttgtgtgtcacttgcattctcccttggtacacagagcccagactggtttcctggtcccttcccagcgagcactgtgatggctttgccattgaggtggatggaggtccttgaccaaagcatgcttccccctgaccccatcccacccgcaggttggcagctcatcctcttccacctgctgtgaaagggctgggtctggggacatgggatgagggcgacttgcctgccctatgaaccagaagatcaacccctctgaagccaggcagcagattctgcggctagatcacccttagatacagcacagggcctaacgtgttggtggcacccactgtgtatttgtgggatgcttgaggaaatcaaaaagaaaccaacacaaaagaaaagactcttcattgtaaaaagcctgatgagaacagacaggatgtggcctctgccaaaaccaccatccacttccccacccaactctctgcctccagtatgccctgagaacccgcctagtcatctgatctgcctccatcatgcaggcgtactgagctccttcactcctcaggtgaagccacccggagcacaccgcggatatgcagcttgagaaagccagtgtgtgctcgcccacgttaccctccagggcaggtgcaggtgaccacttgtctcagcccacctggcccctcaactcattttgtgttactgaccctctctcttccatcctcatggtacttggggtgtccagtttaaggcctgtctcagatatacttataatgcaatagaacagattttatttaccagttgaacttccttttctcccagagaccattatttgcactaaatgtggttttgttttgctttttgttgtcgttttttgttttgttttgttttgttttttgttttttgttttagatgaattctcactcttgttgcccagcctggagtgcaatggtaccatcttggctcactgcaacctccgcctcccaggttcaagcaattcttctgcctcagcctccccactagctgggattacaggcactcgtcaccacgccaggctgatttttgtacttttagtagagatggggtttcaccatgatgaccaggctggtcttgaactcctgacctcaggtgatccacccaccctggcctcccaaagtgctgagactacaggcgtgagccaccacacccagtcaaatgtagtgtttcatgtgagttgtcctattttttttttttttttaagatggagtctggctctatcacccaggctggagtgcaacggcgtgatctcggatcactgcaacctccgcctccctggttcaagtgattgtcctgcctcagcctcccaagtagctgggactaaagatgcatgcccagctaatttttgtattttttagtagagacgagttttcgccacattggccaggctggtttcgaactcctgacctcagttgatccgcccgcctcagtctcccaaagtgtcaggattacaggcgtgagccaccacacctggccaagttgtcctattcttaaataaggatagcacatatagaattattatggggattcaggtgtaaccccagggctttgggaggcctaggtgggaggatcacttgatgccaggaatttaagttttcagcctgggcaacaaagtgaaaccccttctgtgagtccattttgtgttgctctagaggaatacctgaggctgggtaacttgataaacaagaggtttatttggcccatagttctgcaggctgtacaagcgtggtaccagcatctgctcagctctcagaggccttaggaaacttttactcctggcagaaggcagaaggagagcaggtatgacacatggcacgagcaggagcaagagagggagaggaggaggtgccagcttcctttgaacaaccagctttcgtgtgaactatcaaaccagacctcactcattgccacagggaaggcaccaagttattcataaggtatccactcccatgacccaaacacctcccactatgccccatctccagcattgggggtcacatttcaacatgagatttggaggggacaaaacgtccaaaccatatcgccccctccctacaaaaaaaatttagaaatacctaggtgtggttgtgtgcacctgtactcttagctacttgaggggctgaggcgagaagattgtttgagcccaggaatttgaggttacagtgagctgtgattataccactgcagtccagtgagacactgcccaccccaccccgataaaaaaaaaaaaagaactgtgattgggagggtttggggccaaggttgcttaaacaaacacagcccacagctctgtgccaattgaggtttgggattcctgcctcacccctagataaccaataaagtagctatgatacattaagttccttttgttcttaagagaaggtgatgggtgtaactagagtgttgacaacatgaaaaacctaaaatcaggttggagataaatatttaaatctcctctattggatactgataatgatgctcttaagtaaaaataaatatagcaggggcctattaggggagacaggctctggctttcttacagcatgctgttgctgtgtggtttgggtcacgtttcttaacctctctgggatttcctttcctctggtctgaaatgagcagttgttgtacttgccgtataatttctgaggcctcttcttactcagaacttctgactgtttttaaaagatggagcattacctctctatacctgactgtgccgcatgccattcgattttgttatcgaagcaggtcagcccgttgtttttcacatagattcttacaatgcaacaaagcatcacagttactcacaagggaaggcaggggaggagggggaatgtggtgtcagaagccagacccatcctcacgtagtggagctgcacctgcccatctcccagaaagtccttcaagcccctttcagcgcctccacctgcaggcctgttctttgcaagcctggctgtggtctgttttgcataaaagaagattatccagcagtggggtttgctcttctctttttacatggctgccatagcaagccaacaagaaacctgccgtgtggagtgacggtcaggaaccttgcaagatgccgtcgaggctctgtctacaccaggcaaagaatcttccagattcctgctctctaactcagatgaaagtagttgctgcagagtgtgtttgcttctctgtctgcctcagggctgagcttctaaacatacctggtctagtgggttgcacagctgattccaggacaatgggatgagggaaggggaagatagaggctggcagaggtggctttttgtggcatgcatgggaaagcggtagggggtgctcttcacagttgtgggggaggcttagcctgaatctcagggcacagctgaagaaggagagcagcctggaaatgcgtcctaaagagccgctcagccacggcagctgtgagctgtggcccatcagtggctggaggtgggaccatttgagcttttcactgagatagagcctgtgtcaagtgttctgaacaacttgctgtggcctcatgtgagcttggctgtggaatcagggaggccagcacagagcgtggggcagctattcccagttcatcagcatcagccacggtgtgcagaggaggggtgggagtgagggatggtcgagagggagaacctgttgatttgcccgcaagctagttgtggaagacaagcacaggccaagaaatgtgggtggacaccattaatggagatggaaggaggtgttggaatggaggaacacggtcattgactttttgcacatgcttagtctgagatgcctccagggcagtaggataagctaacctgtgggaatgtggagggacgaatccatagctcagaagcaagcggtatctgcaggaatggattatactggctggatcatagggggtcagtgagtcatgagaatgagccctaattgtagagagtaggatgtgtgatgagagaagtggggacgcatcgtcatggggaccatcttgatggagggagggagaaaagagaggagagataggcagtgagcacagaaggaggagaggagaaccaggcaggagctatgccagtgacaccaaggaagggtgcgtttgctgtgatgtgttttcatcacgttttcataattaaccaacagattaatattcctcagaaatacaaagcacctctcaatcatgctataccttcttcccaactttacagtaatacatttcttaactttctagttatgttttagcaccttagaatattgaaaacataaaccaaaccctcatggcacgagcatgggaagcccttgtgatgaaaatcagctcaatgagaggggaaatgcgggaagcatttttagcagaaagtgatgacagcttggagcatcccaaagctatgcattattcagacgtgtcggagcgagagtgcccgatttcaccacccattacctattgggatgccttcttctctgcttgctaatctgaatattactcatttcaaggttttgtttatattatcttgaggggaaacaaacagtacctaattaatcccaccaaacataatattggaaaagcaattattcccaccacgtgtaataaaccatctgtagggaaaataatccattaagtgtgaatcagtgtgaattttaaaactattattaagatcagattggttcctcgttatgagcaccataattttagtatttgttcatgcatactgtgttatgccatgttctgtaaccttaaatccttaatgtccaaacaaataatatctatatgctaattagtgtcaaaaatcacaggtcagccaatcaggtgtttcacagatgagccccttttttgggggttagctcgaatctgtgattaattagaaagtgagtcccctattttgaaattctagtgataattgtagcagagggctgaatttatttgcattttcagtaaatcatccattaactgaaatgaaatctttttgttaaattactgctcctggttcagttaggagggagttttcccttcatttttaaatgtactggagtatccttcagttctccttgagtgagaagcaatcgctttgaccattgtcaaccagaaagaatttccccacagcatttctctctttcccagctgggccataaattgtctcgtgactgaggttgctgtctgctcctgagcaagctggaagcaatgatgagctcagagctgggctttattaaatcctaggaagacacataaaaattgttagcagttgatttcgcaggaaacacctagcaaacttgtcggggtttatattacaaagcccagggcctgcagttagcagatcatcttttttgaaaagcatttgggtacctttgtcagagcttttctgcattttgacgtaggaggatacctgagggccatggttgtgagaaaggagagaacccacccaggtgtcctggggattgttttattcataaagtaattcggatgatctcgaggtggtccagggagatgggatagagtcagccaaggtgtctattgtaagatagattgtgaacccctcaaagataggctgaagtccttattcctgtcacctgtgattgtaaccttatttggaaatagggtctttgcagatataatcaggttgaggtgggtgcatgttggagaaggatgggctctttattttttgtttgagaccatgtcttgctctgtcactcaggctggagtacaatagcatgatctcagctcgctgcaacctccacctcccaggttcaagtgattctcgtgcctcagcctcccgagtagctgggattacaggcatgcgccaccacacctggctaatttttttgcatgtattttggtagatacagggtttcaccatgttggccaggctggtattgaactcctgacctcagatgatccacctgcctcggccctccaaagtgctgggattacaggcgtgagccgccgcgcccggccaagaagggtgggctcttaatccaatggctggtctcttataaagaagagaagacacagacacacaggaaaaatgctgtgtgaccgtggaggtggatcagagtgaaacatctgcaagtcaaggagattgccagcaacaccagaaactaagaggaaggcatgggacagagtcttccagacgggcttcagagggagcatcgccttgccagcacctggatttgggacttctggcctcttgaactgcaagaataactttatattgctttaagccccccagcttgtggtcacttgtcatgccagccccaggaaactgacatgtcatctctccgtgtgactggttaagtcttgatgtgatctcctagacctacgtactttggagctagccagggtatgatcagcgagaggcttaggacttggttagttcaaccaagctgttggagcccattcttgcctcaacctagtgaaatcaaaccttgcatccttttctcttgcctttctgaagatgtggatttgaaaaaaagaaaagtattcctgcaaagttccttatctcaggctccatggcatttctcagagcatccggccattgagaactgactccgtttctccaaattcagccttcccatgtgagttctgtcctgagatgtgattggggattggaagccaagcagacccagcaaagggaaggtgaccagtggactccacctgctcagcaaacactgacctggcttttcctttctgggaagttccgcaggccagctggcatcctccccgatggcatttcctggagtcctcacctgaactcttgggaattgccgcctagagaccaccatgcaaagcaggatgttgaagacagattagaaggcttctttcgcgctgcctctcctgtgcggcttctctccgttgtctgtctcctctcttgtgctttctggatctcttctaaagcttcttgggaaaagccaaacaggaaatgagccaccaagagactgggcttagacaatgatggccaagtagaaaagattctatgttctagcattggggactgcagaggagacagctgcccctttccaggacctgtcgaaggacaaagtctaaggtccgtggggatcacccttcaggaagatggcatcaggccacaaaaatagaaaagagatatcgccctcccttttatagcacaaatgttaccagtcatgctagtatcaaaaattatattccagtttactttctgcttccctttcaggcctgagatgcctggttgatccatcttcgaatactttcagggagctagtttttcttgggcctttttccctcttaggggccaccacagaatggcctccccagccgttttctctccctaattctggagcctggcctgcctgtcctcccgagagccccacctgactttctttgctttgctttgcctctgtggctcagcttgtttcatccgttcctccttgccattttgaaggcagtgccagcactggagaaccctatcagtgcttgcaaccccaccacgaggccggcagccgggagggctgggcgcatccgctcactgtaatctccagaacagataccagcttttcctaaccccctagcctgttctaacccttgaactgcttgagagatgtcaaaatcataactctctggggaagaggagtcagtgtttctgtcctagcagcacgcatcagtgcaatcagagctctgtaaaagccaggatccaccaaggggaggatttgtgaagctttttccagttacagtgagaactgggcaggcatcgagtctcagtttcagtgccgcttgaatacagggtgtcagtgtcacttgagtgctaggcggaagtgcaggttaggcctggatcggagggttaatgattaggtttctcccgggctgcttttcacatcagtgctgtgcaataagcacttttacaagtcaggctgcttcctttgtttgagctgctaaccctgtgtattgagcctagctaaataactccgatattaggataatatacaaatgaatgtgtaaaacacacttcagtgagtactgtgctaaccgcttcttttggtggagggaggaaagaagggtgtttacaaaacggcttcgctttgctattgtcatgaggagaacaggaatttctccaggctgtgtggtcaccggtgaatatatgcatctaggttttagtatttatttggaaatcaaatgtattatgggcaagggtatgtaatgaaccagccatttaaagatccctggacataaaatgcaagcttttggctgcgcgctgtggctcatgcctgtaatcccagcactttgagaggccgaggagggcagatcacttgaggtcaggagttcgagaccagcctagccaatatggcaaaaccccacctctactaaaagtagaaaaattagctgggcatggtggcgggtgcctgtagtcccagctactcgggaggctgaggcaggagaatcacttgaacccaggaggtggaggttgcagtgagctgagatcgcaccactgcactccagcctgggtgagagaacgagactccatctcaaaaaaaaaaaaaaagaaaaaaaaatgcaagctttcgacaaagcctgcctgcctgctttgtgtgtgccttccctttttcttgcagtggccctgtgggtttgcatggccctctgtggccagcctcaggatctagggtcctctctgcttgtagtataagctttgaatgctgtggcccggagcttttccacagcctgtgtttcctgcttctggtctgctctagagaaattcaagtcaggtttggcctggcttggccaacccgagcttgccatgtacctgagtcccaagggtgtctgtcccctaactctagccacctgttggggaggtaggaaggtctgggagggagatgctgaggagagcagagtcgtgtgcagaccaggtgggactggactacaggagagaccaggtgggactagactacaggagagccctggggggccactcctggggccaggagctgctccctgagggaattctgaagctggtttgtgattctgtgtcacagccacctgcatcccagtgaaagctatggttgctttccataggtaaaggcaatttgaggacagcaaacatattttcccccacacaatccgtcattgtctggtgatgggctgtcagtccaaaccgtagcctagaaatcgtagctcaggaagtagagtgctgagaggaacaattcaaacaattttgtttcctaaatgtattcttcagttgaagtctttgtggttaatgttgatagtttgtaggcacaatcactattctatgcatagggacagcttttcctaactctggaaaagagggggtgtgtgtgtgtgtgtgtgtgtgtgtgtgtgtgtgtgtgtgtgtgtattgtcaaaaaccaatggaagagaaacacttcaaaatgggtgagaacagagaacagcatgaaatatggacagcagacagccctgtatgcaatgaaaatgcaggtgcatggtcactagaaaagatgcctcattctttgaatttttggctctttgaaacacctgtgtgacattaaattttttactgaaatgtggtattattaagtcttgcgtttaagtttataatcagaaacaaaaacaccatgtcctgttaaggaaagagttattctgacaacggttagcaggataaagaagattttactcaggagtattgcaataggtgtcaagattccacagaagaggagagagatcagtctcaactcgaaatacagtacaaaacttgggatttatagccaacaacctgggtggggcaggtgacagtcagtggatggaaaattactaagaggacacctcaaggataggaggtgtcttgctaaatgaacctaataggattcttcctgaaaacaggccaatgacttagacagcaaaggtggaggatgagtaatttgatctcatgtcaagggtgtggattcactccaaactctcttagcaggatagagccaaagtcaatgcctagttgagaagagagctcagaggagcctggctaacatttagtcaaaaagagtctctgtcagtgctcgatttagttttattactcaacactgatactttctgagctaggcactgggttaaacacttaaaaaaaagaaaaaaaaaggttggccaggcatgggtggctcacacctgtaatcccaacactttgggaggcccacacctgtaatcccaacactttgggaggccacagtaagagcatcatttgagctctggagtgcaaggccagcttgggcagcatagtgagaccctatctctacaaaaaatttttaaaaattagccggatcatggtgtgtgcccgtagtcccagctacttggaaggctgaggtgggaggatagcttgagcttgagaggttgaggctgcagtgagctgtgatcccaccactgtactccagcctgggcaacagagtgagatcctgtctcagaaagaaatagtttagtggcaggtgagagagcatcatgtaatcgcgatgtgtaaaaacgtgcaagaatggaattgtgcagaaaacccagtgcgggcttatcaacccgaagaattccctctgggccccagggaacattcagcaaagaagctaccttggggattgttcttagattttaacaatttgctgggatgagagtatttgagagtggaaagagcactgggctgagggaacagcacgtgccaagcgatggggaacacaagagccgggttctgtggctgctcagggggcagagctccagccaggcctacaaggcacacaggatgggggtgggggccggagctgaggctgcggagcagtcggggaacctcttccatcattgacaagtgagcccaaaccatgccattccaggagtgttaccctagccgcttgttatgaagccctctgttacttgggatgatctgagtggccttccacgcacttcagaaaataaattccttttttatggtgagcgaaattctaatatatatttgtattttcactaaccttaccaaagagaaaaatgtcagcccttttcctgaagtttcttttgtccacttgtgactttcaattaaattttaaaacctccagagtaggaggaatcccccacagagacaataagttagctgattaattgaaaacgtggaagctatttttatgattaccacataccttgtattttatttttactgaaaacacataagtgaggtcaggtgtgttggctcatgcctgtaatcttagcattttgggaggtgaggtgagaggcttgcttgagcccaggtgtttgagaccagcctgggcaacatagggagacctcatctctacaaaaaataaaattagcttggtgtggtggtgcatgcctgtggtcccagctactcaggaggctgaagtgggagagtcacttgagcccaagagttcaagattgcagagagccatgatcataccactgcactccaacctgggtgacagagtgagactttgtctgaaaaaaaacaaaacaacaacaacaaaaaaactcacataagtgtaccttaggctttttttgttttttgtttgtttgttttgcttaccttttatgtaagtccaatgcttctttttgaacgtggttccactgatgagcttctataatgcctcatcaacagttctgcctacaattttttaaagtggagttagtcacatttttcaggttttccagttgtctcaccccagtctaattttgcatattttttttagctctttacctttattatagcctttgtaaagcattccatttagttttccaaaactggttctttttcatggcactaataattcattttctcatgtcacatttatttgaattacgtaattatagtagcaaggagaattggtattaagtaagttttaggtgaaacccatcgactttgggattgtgcactctgatgagtcgggcagaagagtccaggtgttctaggggagcctgtcactggtcagtggtcagtgtatcccgaggcattgcaaatcctcgcttatctgaaggacttgcttccctggaaatcttgtctgaggatttttgtgttcctcgagtgcccaacacacattgctggaccttaaggggacacttggatatacatgatctggtccagccataagggcacacagtgtgggagacaaggggccattctgggaacagtaaagaaatgagatgtgccctcagggagctcagacaaggagctgctggagaccagcagggaggaacagtgactgtactcaagcctcaacacagatcctcaggaacatcgtgttgggttcattggactctgtatacagtcagaaaagaatccagaggaagcacagctaagagaattgagacagcaatttgctgtggcatctccgcacagaggtagaagtttattgatttgtttcctctgatttcagaagtagtttttcgttttgttttttcagtttctgttcatgtcatagaccagcgacccctgctcctccatgccccttagtctgctgggttgaccagatggctggcacccagcactgtggcatctatgcatttaaatattattattagaggctgagggttttatatggttagctcaagtacgttttatgcattttttttcctggttttttttttttttttttgagacggagtctcgctctgtcacccaagctgcagtgcagtggtgcgatctcagcttactgcaacctccgcctcccaggttcaagcaattcttttgcctcagcctctcaagtagctgggattacgggtgcccaacaccatgcccagctattttttgtatttttagtagagatggggtttcaccatgtttgtcaggctggtctcaaactcctgacttcaggtgatccgcctgccttggccttccagagtgctgggattacaggtgtgagccaccgtgaccggcccattttatgcatatttgatttggagttggtgaatcaactcgaaaacctcaaaagggggctgtgagaacactgggctttttagggataggtttccacgttcaccgatttcatctgaatggactgttgatgcttggtgctgtggccatgcccttggctcctgcatttaggagcagtgaatgtggcgtccatctgcagacgtggctcagcatcatacgttacaagcacagcttttggtacaggagctctcgggtcgctgggagattgaggattatgagaacttccttctttcacacaggggtttatcccctattcagcattacatcagctttctctgactttggcatggtgttaggaatttatcagggaaatacgttctgtttatactgactacattacgggaagcttggataactgtatgggggactttaaaatttatctctctgtgatagtttttcagctattatgaaactaaaccaaacgaaggcagtgggggccattataaaggaagtttgagaatctgaaagtcttgatttcttaaaaggaattttaccataatctctctctcgataagaattaagaaaaatacttacatgtattatgtgcaaagtgtacccgttaaattcaccataattgaaagatgcaatactctgtcaatagtttgggaattgttttaggattaaaagtgagatccatttgtaagaaaatgttttcattttagtaatgttaatttgataacttcattatattacttctcaatatattactttgagagcaggtaaaaagagttttccagagcctactggaactatgctaatcagatttatggtacctcttattttcctggcctttcattttgtttttgtatttaagtcttctgtgttgacagctgtcatttgatgtgagacaggtgaagctccttcctgctttggcccacagttgggcagcattgtccccggcctgggctggcctcatcaagtgaaacatcatgctgccatgtttcgacattttaccttttcaggttctgcactttttctgtgggaccatcccctcttccccgcctgccctcttctctctggggtgttttagattttaacccagcctctaacactggacacacaagtcctcagtggagttctgtcgttcagtccgctgtcttggcaaacagtgcccaatcaagaaacaaacgtgctctgctggctgcaggctgcctcatttctccccgatccgaggaggtgtcacatagtcatgatccttcccgggcctggcctggggcagaacaggatggcaaacacctctgcaacctctgggtttccagtcctgccctgggtgggcctggcttcgcctcatgaaaccccgagtactgtttgactccctgccatagctgagtgcctgccccaaccccactctgagttcagcgcacatcctggtgtgaacgccaccatctcagggacatcctgctgcaaagctcctctctgtctccttggtctcttgccacctacagtctttctcatgggagccccacccctcagaaggctccccgtctctcctgtccgtgagttttcctggaattgtcacaatgcagagaatgagttctgtggggagggtggggaatgtagccctgtggctgtcccagcaagtggcccctgtgggctggtggctggctccatttgagactgccttgaaccatggggtctcctggggaggggctggagctgtcaggcttctttctgctggatgacgttgctgtttctggcagcaccattggctgcatctcagactgtgtcccttccttcaattctgttgatgtctcagtttgtggaaattcggaaaccacatgcctttctctctaggggtgacagcattgttggcctccatcctcctgtcagtccttacgagtgtcttcatgccaggtggtgccgtcatggcatgtgttgggcagctaaccagtcccttcagtgtggggcctggcctcctccttgccacctcgttggtggaggtgacctgggatgctggacccactcttgtttggactcagtgtaggattctctacctctttctcccagttacacagccttgaccaagcttctttattcctctgatcttttttgtttgtttgtttttactttaagttcctggatacaagttcagaaggtgcaggtttgttacataggtatacatttgccatggaggtttgctgtacctatcaacccatcatctaggttttaagccccacatgcattagctatttgtcctaatgctctccctccccttgctgccaaccccctgacaggccctggtacgcgttgttctcctccctgtgcccatgtgttctcattgttcaactcccacttatgagtgagaacatggagtgtttggttttttgttcctgtatgagtttgctgaggatgatggcttccagcttcatccatgtccctgcaaaggacatgaactcattctttttttatggctacatagtattccgtggtgtatatgtgccacattttctttattcagtctatcattgatgggcttttgggttggttccatgtctttgctattgtaaatagtgtcgcaataaacatacgtgtgcatgtgtctttgcagtagaatcatttatattcctttaggtatatacccagtaatgggatggctgggtcaaatggtatttctggttctagatccttgaggaatcaccacagtgtcttccatgatggttgaacaaatttatattcccaccaacagtgtaaaagtcttcctatttctccacagcctcgccagtatctgttgtttcttgactttttaataatcgcccttctgactggcgtgagatgctgtctcgttgtggttttgatttgcatttctctaatgatcagtgatgttgagcttttttttttcacatttgttggcaccatgaatgccttcttttgagaaatgtctgttcatatcctttgcccactttttgatggggttgttcatttttttcttgtaaatttgcttaacttccttgcagattctggatatcagacctttgtcagatgggtagattgcaaaaattttctcccattctgtaggttgcctgttcactctgatgatagtttcttttgctgtgcagaagctctttagtttaattaaatcccggttgtcaattttttgcttttgttgcagttgcttttggcattttgatcatgaagtctttgcccatgcctgtgtcctgagtggtatagcctaggttttcttctagggtttttatcattttgggttttacatgtaagtctttaatccatcttgagttaatttttgtataaggtgtaaggaagggatccagtttccgttttctgcatatggctagccagttctctcagcaccatttattaaatagggaatgctttccccattgcttggcttgttgaagatccctctgatcatttttaaggctggttgagaccagccctgtggaggacttccttaattttcagtggcaatgtttttaatcagtgagatgactcacaacactaaacaattccccatatatcttgtgtgttaggttaagggaataccatgttctttttttttttttttgagacacagtctcactctactacccaggctggagtgcagtggcacgacctcagctcactgcagcctccacctcccaggttcaagcaattcttgtgcctcagcctcccaagtagctgggactacaagcacgtgccaccacacccagcaatttttgtacttttagtagagacagggtttcaccatgttagccaggctggtctcgaactcccaacctcaagtgatccgcctgccttagcctcccaaagtgttgggattataagcgtgagccactgcgcccggcctgctttacactttttacatagatcctggtgagaatcggacctgggatttttctatgaatgagagcctgttgtatgccatacccccaccccacccccttacccccacccctacagccttcctaatataaggaagaaatgaagcagccgagccatcattaagcagatcacctctgaaaatgaaggaaattggatgaaagctctgccccggcagctgagtgctaaattagggagaatcacgggaggccaagggcatggccgggctttgtcgctgccttattatggatttgataagaaacaacttttttgactgtttacattatggaaatgtgataacccgtttgtattacttaaactgtgcattttgtaagtgttgtcaaagggagggagtaatttgtaacagaagcagagtatgtagaaactgttctcgtaaaagcgttctctaaattgctttgcttgcagctgtggaggttgccataaagaatgatttctcatattggattttcaaagccgcaggagtggccacagagcaggcaacggacagcccaatgatttaagattatttaatgccccagttgtcgtgaaatagaaggaaataaactccagtgggctgctagaacacattactacaatctcttaatgccccaaactaggagactgatttatctcctgttatgtcttattaagtgacattcagaagaagaaaagaaaaaaaaggacagccaaagctgatggctgaaaattaccctgaaatgagtgtgatgcaggcaggcttgtatcgttcttaagttcaagaacccaaacttgaactcaacactttttcagtgtgttttatttgttagtacagagatatttgaagatgacagattgggcataagaataggccaaaaggctgtctgccccagtgcttcccagacttcattgagcacacgaatcgcctggggctcttttaaaatgtagattccaatccagaaggtctgggaaggagcctgcaactgcatttctaccaagctcctccatgcttccaaggcagctgttcctggggccatgctttgaaggagcaaagttctcattcatcctgcagaaggaacctgcagaaattctcattcatcctatagaaggaacctgcagaaattctcattcatcctgtagaagggacctgcagaaattcttactcatcctgcagaaggaacatcctccaggcagaaccaaaaacagctcattgtcttcctttatgcagtacacttagggcatccctattccaaacatccgaaatccaaactgttccagtgagcatttcctgtgaatgttatgtcagtgctcaaaaagtttcaggttttggagtattttggaattttggatgttcagattagggatgttcagcctataagcattccaaaatccccgcaaaagaatgaaatctgaaacacttctggttttaagcatttcagatcagggatactcagcctgttgttctttatttcacagtcgtcctttcgtcctttacataactgttgtccctgtctctgcacagctgattgtgagtgatcggatttgaactccctacaccctctatctaacccattcccctcttgcctcatcctcagtgaggacaaagaaggttgctctgggctgcttaaattgactcctacatgctcagtatatatcctgcatgtacctgttttttattttttttatttttattttttttgagatggagtctcactctgtcacccaggctggagtgcagtggggcgatctcatctcattgcaacctccgtctcctgagttcaagtgattctcctgcctcagcctcctgagtagctgggattacaggcccacgctaccacacctggccaatttttgtatttttagtggagacggggtttcaccatgttggccaggctgacaacatatattctcgtggttcaaatggtggcttttgttttcatggcattctgtcatgaacccagagctcttgatgcctaagagctgcctaaggcagacccattactgcctaagaagaagagaattggggctattaaacttgcaggtttgcaggtatcccagccagcactcttgagaggcagtgtccatagaaatagcggtgatgatcaccaggctctccagtacggattcctaggacggggcagcagagccatgcactccccagtgcactggctggtactggggccctcaatgcccctctgggggctgcaaacacaagagatctgggctcccaggccctatgcacttctgcagggcacaggctgcttcttgcattcttaagtccccatggataggaaagcccaatgaattgggatggtctccagtgagggcttcacacttcctttataacatgcagcattttaggttggtgactggtgtgcactgggccaagggtccactctgtctctgtccttacccccgggcttgaggactagcccctgccaaatgtcttacgggctcatcccagtgggcttgttgagtgggctgctgagtttgcaatgcctgtccctcctctatttaccaaaagcaatgttttctctcttcacttgctagggtttcccattctccctgtgcctccacccccatcctcctggcagccagatggtcttccccctcacagccatcactccctccctccttccctccttctctccctcccttccactgaacaactcacctgctggtctctggacctcctgccacataaaccattttccacactgagaccacttctctctcctgctggaaacctttcaaggattgccatttaggagagatgttaagtccactcccctagcctggccattgaggccttggctccctggcccctcccagtcctgggctgcaaacaaactgaagctctgggctcccttgaccctcagccattgcccgtgccatcctctctgctagacatcatgactcagccagacctcagctgtgtgacccactccaaacaccagctactctatgaagtcttcccacctggatgcaagcaccagaccctcgtcttcctctatttccatgaggcaccatgggcacccctcacctcccctcagagtgccacccatatgcgatgcaatcactctcaatagccctgacacacacaagcagggacaatgtcctaagcatctttacatcccaggacaagctcacgagtaggcatgcaatgacggaatggaagagtgggtaaatggacaatagatatcactgcttggtaccttccactacaagcactggacttttagggaacagcatttaagccatagcgagaaaatagctaatgggatttctgaaatccacaatgaaatgtcaagtaaaatgtttcctccttgggtcaatcaatgagctgatttcttattctctgatattgttgtgggcttgctttagacctaaccgtacccttcagggggcttactgcaggtgcacattttcagaaggatggagtcctgagagaaggccctcgttcctggtcctcacccatcctccacccctctcgacccgcagcagacacccccaggtctcctcttttccccccgcctccctggtttccctttggaggtgctttcaggatatgctgcctaatgctggttcctgttagacaggttcgcctgagggctgagggatttcatctagaactacagcccctcgaggggactccaagaactcttggctctttggctcccatctggctcccagcttgctcgtatttgtttgatccgggcctgtgtgtgttacatttttataggatctccctccgatgtgcacatcgatttgttctgttcagatgctttgtgtggaacgtattttatgtggtggtttttggagtgttgcaccctctagagaaaatgacctttcatgcccgtgaataatgaggctggaaatatttctcttaactcagaagcatctgcacgcacttgttttcacacttgagttgatgagcctgctcatggcatgactttcctccaaagacctggggatccgaataatgcctatttttagtgcctcctgaaaacaggaaagggcagaccatggaaatgtttcctttgtgggagtatttagcttcaagtttagcactgggcaggagtgtgtgtgtgtttataagtatgatttgatagatcatttttctcaactacacactgaagaaggggaaaatgaatcataaaggactacctggagaccagtagtggctccagcagtgggttctgggcaagctgtggctgcgcagtgcctgccggcctccagatgagcatcccattcatgctggggagaagccgggacagcttgagcaacttccagtgtaaatgggcttcattcactgtgagttattttgaatgccctcttggccctgtagggagttgcagacggtaatgtatgcatgtacatagaggcaaaacctcatagatcctgttttgtttttgttgaaacactaggtttttgttgaaaattagaggtcacaatgtgacaaaatccctctgttcttaaagtaagaagagccacccaatcccagaagcatattcatgggaagccagttttcatagtcttcccagacttcttcagaaagtagctgttggaaagaaccctgtctgtcagtgtctggaagctcattgccatgtgtgtgctgacctcgcaccctcctaggggaggcagggggctgagaccatctgaagccaccagcattgtaacacacagtagcagtggtgtgttcagaaagcacttggactccaagatcaaggtttctgccactcacatgggcagacagatatctagaaacaaccatgactgtaataacagcagctggtcaccacggagcaggggagtgcctgcaggggaaggagcagcccctgggaaaagcaaatccgctcctcctggcccagggcctgaaacctgggaggctcctcgtcatagggtgggctaagccagctctttcttcctaatgtcagtgaggttatgcacttggcatggcggagagctgccccctcctccgtgagagtgggttagaagatggtggtggtgttaacaaggaaaaataacacctaatgtacacagagctatatccacgggaacctgttctgtggactattaaaaatccaaaattcatgttgaggtcctacctctcagtaccttagaatgtgactgtatttgcagataggacccttaaaaaggtaattaaggttaaagaagatcattaagatatggcctcatcccatctgactggtgtctttatagcaagaagagactaggacacagacacacacagaggagaggccatttgaggacacggggggaagatgaccctctaccagccaaggagagaggcctcagaatgaaaccaacacatctcacaccttgatcttgaacttcagcctccagaactgtgtgaaaagaagtttctgttgtttaagccccactacctgtggccttttgttagggcagccccaacgaactaatacggagtcctattaccaatctttgttatgagagctgcccctgaagtcacatcagttgcatttccggattccaaataccttttccacatagctgggttggggtctctctctgtcgcccaggctgcagtggcgcaatctcggctcactgcaacctccgccctcctgggttgaagtgattctcctgcctcagcctaccgagtagctgggattacaggtgcctgcccccatgccgggccaatttttatatttttagtagagacggggtttcaccatgttgcccaggctggtctcaaactcctgacctcaagtgatccacccacctcagcctcccaaagtactgggattacaggtgtgagccactgcaccccgctggggacaggcttttgaatccttactctttaaaaagaaaaaaaaaaggtgtatatttaaggcctacaatgggatgtgttgatacacgtagtgaagtgatggctaccttccagtaaattcacgtatccatcatctcacatagttacctttcagtttttattttttgtggtcagagcacctaaaatttactcacgtagcaaatttccagcatatgatacaatattattaactctggtcccgtgctgtacctaagagctcttgacttgttcatggacagactgcaactttctaccgtttaacttatatctgcccattttccccactcaccccgcctttatttagaatgtgggggaaacagagactgatgcactgtatctatgtgacgataaaactccatcatattagttagaagggaggagagtaacgttgcttttttatttctggaaatcagaaatcatattgagacaaagttagaaaaagccatctgtgttttgtttggccttgtattggattcattctgaatcgactactaaaaacaaaaggctttgcttcatttcttctttcctttttatatttgaaagcactgtttgggttgtgatttttgtgatgcctttattttattttctgggactgtgggtgattttggcaaagatgtatgacccttaactcaaaagggcgcggtttacaggctaactgagggtgggtttatgagcagcattattctgcaggaacacagaactgtacagacaaggcggaccacagagtggggcctgaagcagcaacctgtcagcctccccttgctgcaaacacctgctctgccccactggatcccaggtacactcgtggccatgtgtgtgggtgggcttgaacattgccactccccctccaagaacaaacaccccctctccaacactaagaaaaatatcagcatggaacataaacgttcccctcagataatcaaataattcaccccaaactgtccactgtgccgtcactggctaaagcgagctgacttttctgtatacacgccatatcattttcctggattatttcccaaaacttgacagaccttaggaaagctatttttgagactttgctgacagtttttctggacccacagtatgtatttcagacatttcagtaataactctgtgacctcattatatgcgtatttttgtatgatcctgtgggtattggtgtgaggacacaccttgtattcttatttaaaaatcccaagttaaaaacagccctggccttttcgagtcacgtccgtacatctgagtttggactaggagagtgacttagttcactacaacattttaccaaaagatattgaagcaatgttttttccaaaatatggcataacacagaattcttggatttgctgaaatcctacagatttttctgtgttcgtttgtttgccatattcatgcaggtgatttgcaggtgtgcaacctggagtccagctgtcttgctcttcatgctgggcactgtttgttctctgctcgcccagcacaatttatattacagaactcacagcgaggtggagagaagacacagtgtccggagtcaggagctctggattcgagtgcacattcacccattgataatactgagcaggcaattcaccaaaaccaccttgtgctgcaccctcttgaatagcaacttaatacatgtccgggagccgcctcatatagttgggttagttgagataatgaacttggccagctttgaaacaggaagtttttgaaacttgccggtgtgcctgcatgttctgtgtgtgccactctcatgctgctagcagtgccttgcctgttcttggtgttcttggaagatacctgagctcttactttgactcctcaaggtgtttggttcgcattcattgacaacagtgcagtttgtacccagaggctctgacttcactctgttgaaggttaaagaagatagtggccttaggggagtcatcaggccattctactgaaggtgggtggcatctttaatgcagctggcagcctgtctggggcatggtccttgctcaggacttatttcccttcttttttctcacctttaagtagaaatgtacataaggacacaactagatattgatttgctaagttcagtgatattcaaagtgaaaatgatacatatacttctggattattttcgttgcaaaatttgttcattctttccctattcggtgtgcattgagtgcctgctaagggctgggcagagtgctagaagacgggaactgtgtgagccagcacaggtgtggagcctgttttctgggagctgagaagttgggggtggagaggaggcacactggacattgcttgagcagccaaatgagatgacaggtgtgatcccagcacactgaaggagaggcacacggttctctaagagtgtgtgaggagacgagtagggctgggatggctgggagctgtgacattggaaggacttaaccatgtgtgcaggaggcagtagcctcctggggagaggcagcagcatgtgcaaggatgggggcccagcactgggttcatcctacaagcatgtgtccgggcctcaaggccactctgatgactgctttccctccctgagcctcctgcagtgagagtgaagctcacgaatgctttgggtgtggcatggcagtgtggtctcattgtgtaaggtgttttgattatgtgtggacttttgcgccaggactattttaaatgctggggatgtcgtgctgaataagcctgaccaagcctctgccttcgtggagtttgccttctacttaggcaggggctcagatagtaatccagcaaacctataactgggccctgcaatgtcagagactatgagtgttatgaatagaaatagatacagtttaacaaggggccagaggggcctgaaaggctgcattgctgtgggcagggaggtctgggaaaggctttggagtgtgggtgctggggctgtcccttgaccagagactggaatgatgaagccagccttgccaaagggtcccctctgtgacttgctctgacaccctaatggcagggatctgcctccttgcctcctctctaccacacaaaactgattgccttccccaaggacaacaaaggagaagaaaagaaaacgaagaaatcagaaaggataaaaccaagagagatcaccaaaggcgcgtggtgcaaatactgatcacatcagtaagaaaactgtttccatccctgatttgcttttcttttaaataggatattcagtcatagcttcactataaaattgatttattgtgttgaaataatttccgtagcaggggaactaattggattgtgtagcataaagaaaatgtatgtgggacaatggggaagaattgagccaaaatgaatccaatatattttaatctctgcaatacagattatattttcaattaagaagcttaacttgcatgtgttcggcgggcgggagcttcccagagcacttcccgcatgtgtttatgggtaataaatcacttagcattaagaaggtagacgatcattagcccatgatcactcagttgcctcctgttaatagcaaagtcaatgcacaccatcactgtggccatattcgggtggtaaaatgtggagttacatggaaagtggaactgttatattggtgaatacgatttactagacggaacaaggaaaacctgaattccatcccctgtgggccatggaaagcccatattcacagtcaagtgtgaaagtggcttttgggccacccgtgccctgtctgaaagcagagcatcatgtggccacgtgtctgctcggctctgccttactaattgtgtttaacctgagctctgctacagacagactttggtctttgctccatgcgtgcttctggcatgacctaggagttgcttgccagtgatgggcagagggcgagggcaagacgctggctagcctttgtccagtggtccacttgtctgggatcgcatttcatcttaaagcaacccatgaggtggaggaaccatgatcatcatattatataggccatggaatctgcctcgtgggctgtcgtagcagagcagtcaacaagttagaagccagagcccttgtgcactcatcggtgcccacaataactcattaggttttttccttttcttcctctcagtcccagtagccgtctaagagcagaagcttctggggcctggccttgcagacactgacctttgactcacctctttatgattaagacaagagcatggaagaaataaaggggtcattaaaaaaaaagaaaaggaatctggcaggaaaagcagaggcagatgtggagctggtttaaaaatctatttcaagtctttccagtggctggctgggtaggcaggggccgccaacacgcaggggccaatgcagccaaggagcagttgcgtaagtccttgcgtaagtagaatgagatgcccagggctcccttgagcgcggccacgtggctgggaacctgtcaggttttatagcatccaatcagacaccgtgcaccaggatggagagcccggaaagaggtcagagctggggaaggcaggtgggggctgtaaacccaacagcagtgtgaggaatgggctcaaggcggatggagtgagcagaggtgtcccagggacagtggcgagcctgaaactagacatggggagagaagagacagagacaagaataacaatggtagtaaggtggcagatcctcagtttaaaatctggccacgatgccattcacttaggcacttgcttgttctagaaatatttattaagcactaggtgtggcaggtgtagaatggatttgcccccaggaaaccctggatctggggctccgagtcatctgtctacgtcctctggagccttccttgtcgattgtcccttcacctccagattcttctactgcagggaagctcccttgacctcaccctcaccctcactgtggacacctctgttttgtccttcacagccagaccacacagagtggtcccctaggtccccagccttcactcactcttcatctccccatgaggctaatgaaatctgttctactgcagttatcaatggtgtcctcatcaataagcccacattaccgccctccccagtctcagacactgttgatggcgcccttgctgttaagtgctcttgtccagtagcttccatgaccccgcgtcttgcgctgtttccctctggcatgtctcattccttctctccctctcgctctatctctctccctctcctctcctcccctcccctccccgtcctccccctctctctcctcccctctcctcccctcggccctatcctcccctcccctctcctctcttccctcccttcctcccttctttccttcctctatcctcccttctctcgctctctctctagctcattttttttttcttctgcccggaagaaatactggcattctccaaggctcttttctcagccttcttttttaggttcttattctaaaatctctcttcagtgctctctcattgatttccaaggatttctttataagtggactgagattgagtacaaaatgtaccttcaactcttgaccttcacctgatcccagaccccactttcacctgggtccccaaggctgagcacaggtccctcctatccccaaggaggtgctctgaacccactccccatggctgtggatggctccccaaccttctgcatgaggtagacacccagttacctctgcagcgtccttcccttcagccaaacccctccccccgccgcccctgctaaatttactttgtcaccctttctagaccaggtcagttccagacatgacctggatgctccttctccttaaagagtgaatgagcaagaggctgggcgcagtggctcacacctgtaatcccagcactttgggaggccaaggcgggccaatcacctgaggtcaggggtacaagaccatcctggtcaacatggtgaaaccctgtccctacaaaaaatacaaaaatcagccagatgtggtggcacacacttgtaatcccagttacttgggaggctgaggcacgaggatcacttgaactcaggaggtggaagttgcagtgagccgagatcatgccactgcactctagtatgggagacagagcgagactctgtctcagaaaaagaaaaaaaaagagaatgaataatgagcaagaatgataggccatggcagattggcacacacataattttataatttcccttttttttttttttttcctggagacagagtcttactctgctgcccaggctagagtgcagtggtgtgatctcggctcactgcaacctctgtttccagggttcaagtgatcctcccgccttagcctcctaagtagctgggattacaagcatgtgccaccatgcctggataatttttgtatttttagtagtgatggggtttccccatgttagccaggctgatctcaaactcctgacctcaagtgaaccacccatctcagcctcccaaagtgctggattacaggaatgagccactgcacccagctggcacacacataattttctaaaccaggggttgacaagctgtaactgatgacccaatccagccctccatctgtagtgtgtatgcatgtgtgtgtcccacaagctaggaatagattttatgtttttaaaggattgaaaaaaggcaagaatactattttataacagatgaaaattatatgaatttaaattttgctgtctatacataaagttttattggcacatagtcatacccattcactttttgtattgtcagtggctgcttttgcgctgttataatagcagagtctattagtgaatgcagaagagaccatatggcctgcaaggcctgacttctttactgtctgatcatttacagaagaagtgtactgatcccttgactagactgtcaagaatggaaagtgcactgttaagaatgggcacatcttattcacagactgcaatcaataatcaataatcaatcactctgatgtaacctgagaacatactgtgtagaaagcatgctgtagaggatagcgtgtgcttccccttgtgctccccagtctgtttcacaagttctggatgattgatcaatgctcgatcaatgcgagctcccttctccatcatgggaagaatgggaagcctgcccctcccctgtggtgcatctggcatccgagctggtgttcatcgcttccctctctgctgggtgaggacctcgtgggtgaggacttccacataaaaatgaggggtaaggcgcaaacatcagaccagagtcacaggagacattatcttccccgtggccgccctgcctggtgagtttactgatttgcctaagggtggtgctggtgtgtgtcttgcaccatgcctccctccagcctctcagatatgtcctgtccggtggggacgtctctcctgtgtatatttttggtggctgagcaaagtgcttgtggttcctttcagccaattgtgctgaggcaaaggcgggccacttaaattgcagtttctctgatgtatcttctaaaagccaaaggtcgttatccacaaagggtacttttgtgtaacaccaggcactcgagtagatctgtggggtcttccctctgtgggtgatgagtctgggtttcagcatcccgcttccccagaccacatggccactgatccgtggggtgcacagaaggacaggcagtcacatgcctgcttctttgagttctgccacctacgagctgagtaacctgggcaagtggtgaacctcatggattctttgttgccaccagcaaattggggagagtaattgagagggcatttctgagctcctggctcagcaggtagcatgttagagctgcttgatcaatgcgagcccccttctccttcatgggaagaacaggaagcctgctcctcccctgtgctgcatttggcatctgagctggtgttcagtgcttccctcactgctgtgtggttgccaaagcctcctgtggagtaaggccctgcactgcttcatcctcctgggagagcaggcagtggagcaggatgctgcatacagagctggttcttggttcttgaggagggggagcggtggctctgccagctcagctgtgagtggtcccaggatgaaggaacagcaggaaacaaagatactctcaaggccatggagaagaagtgtgaggtagatgctggcgcaggagcccacggtgggggagaatccgcttctgatgtcttccaccctggacctcaagtgtcaaacagcaagagatgggctgagcaaagatcacccgtctcaaattcagttgacaatcagcaccagccacgtctcctgggaaacatgaagtggccttaaccgtcacctgcctgtcatctcaggcttgccattagtcaggcattcgttaaagaattctgtcaataatagaaatcagaaatgcctggaaagtagatttcttgcagggcagatggagaagacagcctctgggtctccaaacccctttggctctcactggggcttctgggcaggactggggacccatgtacatgtcatctcagggcagctttctttctaaacccattttgcagatgtggcggctgaggtctcatccagcacccagtcacgcctctcttgggggagagccccaccgttgggagctgagcaaaggcaatatttcggttttttttttaaaagatactgtgagttggtcatcactagacttgggtgtaagttaactgttatctcaccactttgctaccaggttataatcaaagaaagtcttagatcaaagtcagccacacacacagacatttatgaaaaatagttttgcacaatcagtgcatactgtctgttcttaggcttcataaaacccccttccctgtcatttgaggtgctctgcctgagccttgataaatgattcatcagaagcaaatgagaaagtattctggaggcaagattcaatttgcatggatagtcatcttagggaaccagcatcctccagacccacagcttcttgccactagaacacagggtccagcgttgggcactgtccttcaacactgggcttcctacacacacacatccaatccacgcacagcccgggagagtccctgaaacattttagctcatccacataccttgcatggtgtggaattcaacaaggagaacccatttctcttaatcattacactcattaagaaaacacgaagctcacaacagaaaataatttctaactattattattctgtggtttctgcttttgatcaagataagaatagccgaagcacccacccaggtcactctcatggaatggggttttctgattaaagattggcaagcaactgacaagcttgtagcacatcctttaagctggcactcgctgtttgagtacttgagagttatttgcagacttcctaagtctttcgttttgctaactgtgtgtcaggaactgttctgggcactctatgcaatgtgagcttatttaatggttaccacctaggaggctgatgtgctcttgacacccatttcacagatgcagaatctaaggaaatctgctcagtgtttacacagccaactggtcagtggtacagcctggatttcatctctgggtgtttattcctggagtccctgctttaaccaccatattaacctgcttctgaacaccaaccaaagcttgaatccagccttccaaatctcaagcctgggcttttgttaaggaggacgctcagggtttcttgatagccgaactcctgtatgtccaggaaagaataaagaccagatggtcttgatatgaaaaggcagcagattttaactacaaaatgggaaatgagtaattcgtttacgaggacaaagtagtgaaaactgttcttaggcttagggtaggtgattatatcttaactctttgaatgttcagtcaaagctatatattcaagatattgtgggttccctaccagaccaccacgaaaaagtgaagtttgcaataaagcaagtcacacagattttttggtttcccagtgcatatatgttatgtttacactataaagtattttattaagtgtgaaaagtatgtcttaaaaaaacagtgtatataccttaatagaaatactttattgttaaacaatgctaacaattatctgaggcttcagcaaatctaaatctttctgctgatagagagtcttgcgtcaatgttgatggctgctgactgatcaggatggtggttgctgagggctgaggtggctatgacagttttttaaaataaggcaacagtgaaatttgccacatcatttgatgcttcctttcactcaagatttctctgtagcctgtgatgctgtttggtagcattttacacacactaaaacttcttttcacatgggagtcaatcttctcaaactcggccaactgctttggcaactaactttatgtaatattctaaatcctttgtcatttcaacaatgttatcagaatcttcaccaggagtagattcatctcaagaaaccactttctttgctcacaagcatgagtgggaactccttatccatccaagttgtatcatgagattgcagcaattcagtcacatcttcagagtccacttctaattctagttctctgctatttccactacatctgaatttacttcttcctctgaagtcttgaaccggtcaaagtcaaccatgaagatcagaatccacttcttccaaactccagttaatgttgatattttgacctcctcccatgaatcatgactcttctaaatggcttttagaatgctgaattttttccagaaagttttcaatttactttggtcagatccattagagaaatcactatctctggcagctatagccttataaaatatatttcttaaataataagacttgaaagtcaaaattgctcgtgattaatggactgtggaatggatgttgtgttagcaggcatgaaaacaacattcacctccttgtacatctccatcagagctctgggttgaccaggtgcattgtcaatgagcagtaatatttttgaaaggcatcttgtttctgagtatcaggtcttaacagtgggcttaaaacattcagtaaaccatgctccaaacagatgtgctgtcatccaggctctcttcttgcatttatagagcatatgcagagtagatttagcataattcttaagggcgctaggatgttcagaataacaaataagcattggcttcaacttaaagtcgccagctgccttagcccccggctatagagtcagcctgtcctttgaagttttgaagccaggaattgacttcttctccctaaatatgaaagtcctagatgacatattccaatataaggtggtttcatttacattgaaagtctgctttttagtgtagccaccctcatcaatggtctatcctaggtcttctggagaacttgctgcagcttctccatcagcactttctgttcaccttgcacttttatgttatggagatggcttctttccttaagaatcaacctctggtagcttcaaacttttcccctgcagcttcctcacctctctcagccttcccagaattgaacagagtttagggccttgctctcagttaggctttggcttgagggaatgttgtggctggttggatcttctattcacaccactgaaactttctccgtaaaaaagtttcaccactaaactttgcccactgcaagctgagaagatccttcggagacctctttggaaacacatagcaaagaaaatgacagaagccgccatctcttgtatctttaccatgctttcaacagtagctaccaattattgaacagctggtaggacccagcctctctatagacactgaggcttctaatctccttcttctcaagacctcaataaggaaaatgagttcagagctgttattaacttgaggaaggttgcacagcctataagtgacaggacatgaatcaatatgacctgtcacttatagatcacttatgaccttgaggctcctgctctttctagttcttcatttctttgtgtgtttcctgtagctcttctccaagggcacaccccacatagagagacccaccaggcctggcttgagtgaaactaaatgcgtagtgagtagaagttgccaagcaccagtgagaatgggaaaatgtggacaacgtcaccacctgccaggtagcaagcacctaggctcctacaaatgggcaaaaaaaaaaaaaaaaaaaaaaatcggtctcagttttcagcctatggcaaatgagccttcagcaaatgacatgagcatgctaaatgattgcagtgtccatagcaggtcttgaaaatgaacccggataaattttaagcatcactggtgtatgctgagcgtgaaataccttgaaagcagcattctcttttgtaaggatcctattttctcttaagcatttctgccttgaaccgtatggtttgctcaaggcctctgactacttcctttttttctgggctgactaggattcatttacactgtttttgtaaggatgcgttgctggatgctgtggggaataaagattctgcacagatggaccctcactgtattgttgtagaccaggggccattgcctgcagggacctctgtcctgggtggtgtttggtgatcagaggcttgccagggatggcagggacgccagggacagcaaggacggcagggacgccagggacggcagggatgcgagggacggcagggacgagagggatggcagggatggcagggaggcgaggtctctggttgtcgtgattgggcgtctgggtgtgtgtttgtttatgcttgtttattaatgccccacctacttccagagagatctggttctctgggaagtgaaggttagagattcttattcccgggttgttttgatttattttttaatcatgaaactgagtcacaccaatggtacagatatgaacagaaaaattatgagtcccatgcctgcagtttctgaaacatgccctctttccttcttgtgttttttcttttttattgtgattttatatatataaataaatattatatatatgtaaccacaatagaaaagaaaaaatacatacattacaaagtttgccatttaaccgtttataagtgtatcattcaatggcataattacatccacagtgttgctcagttatcactactgttgatttccagaatgtttgttcaccccaagcagaaactctcaactccctgttcccatcccccatgtatatggaactaggaaaagactccagtggcagctgatgacacacattcctacaccccggcaagcagagcatccaggacaacctgtcctgtgcccgaggggtggggcacggtcaccctgacctcccctgcttcccctgcccatccatggctgtccttcactcacccaattagtgatcataggacaacaggaggagcctgggagaggaaggaggaggcctgagggatggacactggggtgctgaggcggaggtctctggggtgagcagacactggggtgctagggcagggtctctggggtgctgtggtggggatccctggggtgaacggacactggggtgctggggcagaggtctctggggtgagcagacactggggtgctggggcgagcagacactggggtgctggggcggggactctggggcgacccaagacccttctttatttgccgggatggagtcttacagtcaggctttgccctctctcgcggcctcccccagcagtagagacttctcacttcctgatgttcgctgctggacatttctgatgtgtttgtcttggagatggttttttcattacccaagctgctgctaaatccgtcaacatttattttgtgaagttgaaataggtggacgaggcaggattgggaggaggtagaggcgaataagaaggaccaagtagtggagagtagagggagagtgggtggccttatgatattgaaaacacaatcctgaaattagactgttagtgatgacaggcttggtgctctggaggtgaagctgagggtacctgcctaccttgatttccagactggtttatcccaacacttgctaactccacgttagggctcttagtggctaattgtctctaagcttgatttccagactggtttatcctaacacttgctaactccgcgttggggctcctagtggctaatcggctccaagctttggagggagcattttaaggtcttttcaatcaacacattttattttctgatgacctagaaacaggtgtgaactctccgactccccaccaaaagaaagtagatgaagaactcttcaaaatttgtagagaggacatatcagaattgaatcacaacttttcaggccttggcaaaattttctttaaagaaccaacacaggcacacctactcagcactgctagtgtagtggggaaatggctggctaatccctactaaaagagttttgctgtgttctaataaaactttatttaaaccacctcacaccgattaggatggctacatcagaaaaaaaaaaaaacagggaaataacaagtgttgatgagggtgtggagaaattggaacccttgtgtactgttgctgggaatgtaaaatggcacagccactatggaaaatagtaggatggttcctctaaaactttaaaatagaattaccagatgatctggcaattccacttctgggtatcatcaactgaagaatcataaggtacataaatttggaaagcagagctttatttctcataaagggttgcagcctgcaggccagccattccgcagaccaggaagcgtagcctccagcttctgccaagagcaagcacttccagggaggaggaatgagacaggaatttatgctgagtgggttggctaagtatacataatcaataagctatagaagaagtcatgaatattaatgaaggagaaacacacacatgtgtgattgagccatgcctcttcgtgggtcccgtgttcaaaaaaataccagcattaggatgacccaagggtggaggttttggccctctgatgtcaaaagttcaaacagaggccacgaaaaccctcactgcacatcctccttcgactggccagagccaccctgcagttggtagcctctcagcaggagggcatgcagtgtcaaactggcaagctgtcacgtggaaactgcaaagagggagggggagtccacttatggctcagacaagtggctaaaggtgatataggaatgagttgtctgcttcttgttttctagagccagtttctgcttcctccttaggagagaattctggttaaaggctattaaggaaagggtatactgaagcgggtccaacctcccatctcttcatggtcatgggctgactcagtttttgttgttgttgttgtttttgtttttttttgttgttgtttttagacagagtcttgctcttgttacccaggctggagtgcagcggcgcgatccagctctctgcaacttctgcctcccaggttcaagcgattctcctgcttcagcctcccgagtagttgggattacagacgcctgccaccatgcccgggtaatttttgtatttttagtagagatggggtttcaccatgttggccagattggtcttgaactcctggcctctggtgatccacccaccttggcctcccaaagtgctgggattacaggcgtgagccacggcgcccggcccggattcagtttttaagtcttctctggggtccctttggccaagaaggagtctgttcagtccattgggaaacttaggattttatttttatttctcaatatttatccaaaataattgaacataaggacttgaagagagatctgtacactgatgttcatagcaacatttttcacagttgcgaaaaggtagaagtactcaagtgtccatcaacagataaatgggtggtatacacgatgtggcatatgcatcccaaagcctccatttcctcatttgtaaaatattgtgtgattcataccccgcaagacttgtgagcatgaaataacatgatctgtgtgaaagcaatgacagtgtctggaacttagggggtgctcaccaaatgcctagcagcaaagcagcagaaactagaggtggtcgtgtgggagaggatggaggaaccggtggctgggaactgcctactttcaggatttcttacctttggcccacgacaattccttggccaggaatgctgttttggtggaaactgggatggtatgcatccagcacgtcactctgtttattaggcatcagactggtagacaagggcccagtaatctcggctcatggagacccaagtggggatgacacggcctcaggctagagcagacgcaccctgggaatcctctgtattcttgttggcatcacagcccaagcctgtgtccagcagggctgaccagaagaaaggtctggggcattttaggttttagttaagagtttgatggaggcttaagcttttattgatttgaaaaagaaaagaaagggaatcttggaaaaaagtaactcgctgtagtgcagacaggaaataatagcaatgaaatcttttggcttccctgctcctgaccccagaggtcccttcctcgctttaaaatcctcaggcaccccctccacccctgttgcccacaagcaaatatgcagactccagagccccacatccccgtctctcacggtctggcccagttgatctctctcacctcattccgaaaactttctagtgacattggtcttcccaccgtttcccaaatcccaaagacacgaggcagatcccacccagtcccccagctttgcattactttgcccttgtgatactgggggacgttcttagaagtcacttctttccacatatatggtttttgtttcccagtcaaggtcccaaggtaggaagtttctggccatgtgagtcaccacctggatgaaggagccaccctgccaagtgtggggaggtgccaggagacggagcggctgagatgaagcattcattatctctccttcccatggaactgaagtgacattctctgcatctctattatcacttcacctcaacttgcctcttcccagcatccctgaattatgcagaaatcatttgaaggcaaattcccagctactgttgctagactcatttttctgcagggatggaggaatgtgttgctagactcatttttctgcagggatggaggaatgtgtcacttttaatttgtttccttttttcccacccattttgggtaaaacattgtgttaaaagatacatcgtctccacccccaaagcagcctgtcttcatgcccaagggatttaaatgccctcatattgaagtgtacaagctaattatgtaacttaaagtaagtttagggaaggaatttaaatacccccacagcttcacaatgtgagaaatggggctgtgcaagcccctggaagttccctgcctttctccacattctccctctgtagtaatgaggctcctcatctttctgttttattggcagcaaacactgggtaacaggggtgctagaagggcctgagggtctgtcataagcaagggcctataattgtgccaggagcctggaatagttaaattggttcctgattacttttcactcgctaagttcccctcagctcaattaacatataattatttaggactatgctacttttgttactggcacatggctttccaaataggcagctttgggggatgatctccctctggagcccacgcactgcatccatccacccgccctttttgttcaagaacaaaagcaaggctggcgggacctcctccagaaccttcatgctgcagagaggcttggaccttggcaggtgcctcctgcaggcagagcctcgccggccacaccagcctgtctcccaaagacgcgcagaactgcagaattcacagggcttgtctttctcttttaccaaatgcgactttacattttgtaaggtgtcagtggagatcatatcagtgttcagataactttgtatcatgtggtgatgcctcttccttacctttaatctcaaaaataaaaaaacaaaacctgtaggttcaaagttccagggagcttagaggcactggggttgagtgctttcatttgtcagtggagaagatgagggtctcgaaaacttgagcaacattttttttgttttaacatttttaaaattctattgtaaattgacaaataataattgtgtatgtgtatggtatgcagtcgatgttgtgatacatgcattcattgtggaatgattaaatcaaatgaattaacatgtctgttccctcacatacttctcatttcttggtggtgttgaacaacgttccgaaggtcaggtagctccacgtttaaatggacatgaagccattgatagatagatagacatacttgaattaagactttaattgtacaaatgtgtgtatgtgtaggctacaattaaactcatatttgacactgtcaagaattagtagtttttgttgctaatggggttaaatgtccaggataggaaagcttactggtttgttgttgctttaattgcattggcttgggagtgaacccatctccctttcttattgacctcacatttttttaagtggataatgttatgacaagtttgataaaaatgatgcttctgactttctggagacaggaatcaattaccaagaagagataacatttctctccattgagccattaaaaataaaattcacaggcttctagaccttacggctttttgaatctttttaggttgacataatttgcctgtgattctttctggattatttatttgtatgtttggttttatctcctgaattttagattacaaataatccttccttagattttgaccatttttaggacagcattcctgaaagcatttaattctcacagcatttgttattgttttttagaaattaattaattaattctcctggctcagaataagacataatttgtgtggttcacaaggtggttgatcccttccccctgagtttctggcatttctggtggaatccctaatgagaagtttgcataagaagaacctgaagagagctgaatcccaccgcagaaaacctacacggttttctgcaaggactcagggagagccaggggcaaccaaatactctagcctccctgaggcctctcatttgggccagagcctgaccttctgagccagctctttcatccattcattcattcacttactcttccatccacttattcattcattcctgtgtcagttacctagtgagcatatactgtgtaccaaatgctgacttggcactgaggacacttaggtgaacaagcaggtgttgccactgccttcgagatacctatgctttactcacaatctggagggcttctcttacctaaacccaactccagcagtgtccagcacagatagagttgtcaggatgcagagtcaggcgcattcataccccacacgccctcgaattgcctgctgggcaaaggactatgatcctgcactgtgtggagcccctcatttcatttggcaaggcatcctcccatccaaacacttggcttagcttgcaatccttctcatattcctctgtaacagaaagcggattggtatgcaaaagcttctaatatgattttcttattttccctactttcacatttattagaaataacttatgaattacagtaactaatagattttttttttttttgagatggagtcttgctctgtcacccaggctggagtgcagtggtgcagtctcggctcactgcaacctctgcctcccgggttccagtgattctcctgcctcagcctcctgagtagctgggattacaggtgcacaccaccaggcccagctaatttttttttttttttcttgagatggagtctcactctgtcgcctaggctggagtgcagtggtgcaatctcggctcattgcaagctccacctcccaggttcatgccattctcctgcctcagcctcccgagtagctgggactacgggcacctaccaccatgcccggctaatttttttgtattttttagtagagacggggtttcaccatgttagccaggatggtttcgatctcctgaccttgtgatccgcctgccttggcctcccaaagtgctgggattacaggtgtgagccaccatgcccagcctgtaattttttttttttagtacagacggggtttcaccatgttggccaggctggtcttgaactcctgacctcaggtgatctgcccgcctcagcctcccacaccacactcggccgactaatagattttcttacctaaaagttagtctctggttatgtttctccttgcctcattgggtgattggcccggggcatagctgtgtttccgtcccgtcaggtgtgggctgtaggatatcatttatgcatgtcctggaagtttctgtgcaagtgacgcagcccttgatgcattgagcccaagcatcatctgatctttgtttactgcactgattatggttttatttgatctttccttcagctttcctcatgctacttgaatttccacgttgtttttgtcccggcatttaaaaaaatttatagggaatctgaattacagaatctacctctcagccctgcactttctcagtcgtcagtttcttaaaaggtttttgttcagccttcacattattttagcatgacatacatagttttttttttttttttttaatttgagacaagtctcactctgtcacccaggctggagtgcagtggcgcaatcctggctcactgcaagctccgcctcccaggttcgcaccattctcctgcctcagcctcccaagtagctgggactgcaggtgcccgccaccacacccagctaattttttgtatttttagtagaaacggggtttcactgtgttagccaggatggtctcaatctcctgacctcgtgattcacccaccttggcctcccaaagtgctgggattacaggcgtgagccaccgcgcccagctgacatatttctttaagtcattttgagaactgtctttatttaactagctgcagttgtcccagagcttaattcgaagcagcatattgcaactgtttgggtgctatcttgaggcacaataattaccctataataataatgtgtgttttagtaaactggtcattattgtcatagagggctggaaagagtgtcttcttaaagctcataaggaccctagggtactctgcaaatagcagagttctaaacctgaaggaaaaaattaaggggaaaaaaaattgtgttagtggtcagaagccccgtgtccttatgcatcacggcacagcccaccctgtaatgacaagaaggtgttgtattccactgacacttgggggcttttctgtgatctctggggttgctgcatgtacatcctcagaggctctctcaacacagttaccaagggtcaggtgggttacttagaccatctctctagctcatactttgtacttctgggggctgaaggtgacaggacagaccccatcccaagactggggggctgattagagttgccaggcatcccgtatatgcaaagcatgtcctgaattttgcaacttttgtcctggatcctttattaatttgtcaggatgctctaaatgtcctgtattccgctttttttttctaatcaattacagaattcagcaataagagctttattcaaatttaactgggcatcctatatttgcaaaatctggcaaccctgcggctgaggaatgttgctgcccagcctgtgttcttggttaatggacaaggcagcaatgcctgcgtccctccattaatagtcacttagaaacactaattcctcctttctggttatattttaatgtccccggggaagaagtcaaataactccacctgcagttttctttagtgaccaaaattgcaaactctgtcacaggccctttgtcacagctgttttggtcccagagctagccgataggtttcttgatgaaataatgtctgcgaatccctttctcagagcggcacgcagtgtgagcgtgagagaatctgcagtgacagcgggtgatgggcgggaggtggtggtggcaggtggcgatggagacctccttaaaaccccaggtggtgaatttcttcttccctcctccctggctcactgccttttagcggctgtgacatggccagggcgtggggagcttctccaggcacgcttggctgaagagataatgctgtcagaggacagcagttactagtaagtaacctacatttcccttctactctggctgctccttgctgtctaaatagagaaagtggaattaggtttatcatctgtgacctaatactaattcctcttacatcctgcctttgtgcaaagggaaaagggccatttaaaaagtagtggacgaagctttagtattgtaagcactttcaagcgttataaaacaaatctgttgaatgaacaagcatgtgagagttggtattctagagtcacgtgtgatcgcccaaattgtatatttcattacaaaaagtatataaagtcatggtattatagagtgttaaaattatactttatcaatgaatcaagaaattaaaatttctgagaaaattcttgtcaaatcactttcatgtctactaaagcttttaacttcttctctagtaaaatagtggtcaaaattagcatgtggaaagtaggccaatgatactgaagtcgtaagccatgcttccaagcctggagatattgcagcaacctcttccaagcctgacagctccttgcgaagagtgctttcaactgggtagcttgaaaaagccagctaagcaaagatcagtggaatcatagaacattaagacatggcaacttgagaaaacgatttaatttgcacctttttttttcttttttttaattagattttgttttaagtcatacttttcaaatgttactttcagaagctgttattttggtctgtttctttcatcctgcatgtgctaatttccttgattaatttggagaacatctgcatataattccgtgatcttttcgttggcaaaacctcacagctttgcgcaagacttggagagttcacattccagacagtctgggattgtatctaattgaaatgccaaacctaccgaagtgccagagcgtaagtgtgtaattatgtaattttctcttgatctttcagagtcttcctgcgagcaattaatcagtatgcagatatgctgaacaaaaaatttctggatcaagccaactttgagctacaggtaagagaagaggtagacacgacctttgtggagaaatcatgttaaaacaaattgctggtccgagccagtatcttacagtatttctaatccttgaacttaattggtctcccatccaagatgcggaaacggaatttgtagtatgtactattggaacctgaggagtgaaaattatacttttggagtattcgcttaatttagcaaggaaagagatagagttgtttcagagagaagctattgaatcagagtgacaagaagggactcttcaagcagggaggccaccaagtcccggtgtgtgtatctgccaagattgtctcagcccatcttactgtggagggaggatcagcagaggaggagacccaggtctgcacctcgagctcagcttgcttttataactctgtgttccctccatatcctctctcggccttgtgctactagcagtggcttttaccaggccagagaccctgccccccagaccccatggtcctcagaaatgctcctttggtgaatgcagtgtgtgagagagagagagagtgtgtgtgtttgtgtgtgtgtgtgtgtgtgtgtgcgcgcgcgcatgcatgctgtaaggattgattttgcctggcctgatttgtgtgtgtgtgtgtgtgtgtgtgtgtgtgtgtgtgtgtgcatgctgtaaggattgattttgcctggcctgatttcttactgtgcatccaaaatgtgtggctctcacttccattgtactctggatgtgtttctgctaataatgattttatctgtcattattattacttagtttattttagtaaagtatacaaatttttgaaaagcatgcagatacaaatggcatgtttatttcctgggcaagatgattcactctctcaaaaggaacccgaaggatttttgttcacccattgggtgatccaaccccaaaataagttacccaatagcaaataataagtttacccaatgctctttcatttgcattgcccttatttttataattttttaattttaagtgtttgttgtattggcattacaggatataattagataataatatatcaggtgccatatatctaaacatgttacttgtttataaaattttttatcattttctctgctgaatgcctgttttcatatgtcataataacatactttctctttatacaatatatatgtgctgaatatcagtttagcaggtaaaataggaaacattccttcctaaccctttgctgcctctcactgcccctctgcagggataacttttaactcattgttctgaattctttgtcacgctttcagcatttatatgggcctgtgtgtgttttttttcagcctttaacatgaactggatcataccctgtgtttttcagctctgtcatattccacgatatgaatgtaccaacatttattcagccatttctgcactgataacctagaggctgtttccaggtgtttacaatcacaggctgtgctaccgtgagggctgtgatacatgtgtctcttagtacacgcattgctatggaaaaggttgatctctaggccaaatgatatgacattttaagtttgatggaaaatgatcaatttccttcctaacatgattttagcaatttgccaccccaccaaccttgagagcagccactttctatctagaatcttcttcaacactgatttaaaatgattgatttttgtttttattgtcatttttctgatgattatttaggctaagaatacttagtggccatgtgggtttctgctgtgaattctctgatcatttcttctcctaacattcgtatttggctgtcttttttataagttggaattcttgatataggctaggcatgggtttaggcttatcatatagaaatatttcatttttctgtagtgaaatctgttatttcttttacagctatctggtttcatgttttacttggcaaatctctccttgccttaatattatatacttctaaattttactgttttgtgttagttaggatctgctaatacctgtgtggttttgtgtttttgtttttatctttcaggtgtttaatccatttgggatttctgtagttagtataggggtaaggatctaacttcactttttcccacgtcatttcatgaatagatgactctttccccaatgattggaaatgctacaattaacataattataaatgtatgtgtgtataaattccattttctgtgttattatcctagaggcttaatccttatacctttgtacccagctagcagagtcgctacttttccactcgttttctactgcagaattatcttggctgtttttgtgcatttcctgttccatttggagtttaaaatcagatagctgagtttctcttttaaaaacatactgcttggattttagctggaatcccattgaattgataaataaatttggagtaagtttatggtatttgagggaatactttgcagtatttttttccccatctcatactagactatttaagtatttgttttgccatttttctggtttttttctaggtcaggtctcacacatgacttgctgggtagattcccgtgtgttttagttgtggctgctctggtgggggagcctgtttctcaacatgttggttctccctggctttcgtcctgtttcatgaggatggccccttggactctcaccgtgagcccgcacaccttacaagccacgtgcttcagggcccacatcgagcgtcgccccttggcaggtgtgacacacatatttattgttgtttgaggagggtttagcaggaatcgctgcctgctgtcggctgcattctgagagtcacagtcaggggcccatctagcatacgacccatgtctgcatgtacccagcacagatcttaatttaaacaccaccgtcaccaccatgagtgctctggctcaaaggcagccctggtcctatgtaggaaaagaaagaattaggagttggtgaagctgtcatttaaaaagaagcattcgtgttttgttgttgttgctgctgctgttgctgttgctgttgttgttgctgctgctgctgctgctgttgttgttaaagggagcaggtagaaatgaagatctattgtgagtcctcgcaggcatgggtcctattctggctgagcccctgaccatgattctcagaatacaggtggctgcagccagtgattcctgccggtgctgtggcaaggctgaaatcggtgggaggtgtcagtcccaaaaacaaaaggaacgacttgtattttattgactggcactcccctttctttataaagggggctaaaaaaaagagagccccattgtgggctctgaggttgggggtgcctggctcagacccccattctgcttcatgtgttacctgtagctttgggctggtctctaaatctcagctctgcaatggggataacagcacctacttggttattctgtggtgatcaaatgagctggtgtattactatagaaagtgtgctgttcatgggaagtgttggataaatgcaagcccaacagacttttctcaaatcctacaaatgctcttaaatttccccttacttctcaggtaattaaaaatagagtcaatataatgttcacactttatttttatagaactctttgcagctatctcctttgatataatacatattatccctggtttgtaaatgagaaaactgagacctacaactttcttcttctaaaggccgttgtcttttaaaccgcatatatgtagtccataaacccttgaaatatgggtttattgaaagaagaaatgtttgatctctttacatttgttttccttgtctagtgtatgtgtgatttgggggtaaagagtcctaaattatggaaatctatactattcttaagtgaggagcttcataattacattaataaaagttaacattggccaggcatggtggctcacacttgtaatcccagcactttgggaggctgagggaggtggatcacttgaggtcaggagttcaagaccagcctggccaacatggtgaaaccccatctctactaaaaatacaaaaattatccaggcatggtggtgcacacctgtagtcccagctactcaggaggctgaggcaggagaattgcttgaacccagaaggcagaggttgcagtgagccaagatcatgccactgcattccagcctgggcaacagagggagactccatctcaataaaaaagagctaacattgatgaagtgcttacacatgctctgtaccgccttaaattctgtgcatatatttacttctttgatcttctgagcactcctataagatagatactcttgaaattcacattttatccatgaggaaactgaggcagagagaggttagagtctgagtaaatggcagacccgggatttgaatatgtgcaccgtgacctctgagcccacacgctaaggcctgaattacaccgtgggtggctggttagcaacatgtatagagtgagtgtgggttttttttttaacttttcagaagtgtgtgctgagcaaatgataaatgtctgagagcattgttgagatcctatatcaagctgttcaacaacttagcatctcctcctttttggttttcagctgtggaacaactactttcacctggctgttgctttccttactcaagagtccctgcaactggagaatttttcaagtgccaagagagccaaaatccttaacaagtaagttctcatctagctctgaaactgcaggcaggagcctccaactctaatcgcataattttcatgtcatttctaagccaacttgatacaaattgagatgtaatcacggtgtaatgaaagggtggttttaaatcaccaatcaggtattgccttttctaacccatgaatcaagatctaaaattgcaggactcatcctggaaggttccaggtcagtgtaatccaagactattagtgcaacacagaatttcagcttccggagataattccttttgctatgcactattctgatgtcatttcacatgtggttgactttattgcttaattcttcaattcgaaaggagcttctgatgaaagctcttggctctattgggattgttgaacagctcactggggagttagagctatcggggttccttcttggcagcagataacccctgtcttcttccgggcaggagctttgaatggactgaagcggcaccttctatcattgtaaataaacctctccaaagctccatgaaagccgagatccttgccggcccctccagctctgtaaccccagtttgcatcatgcaccgctcatgactcagtatcaagaagcaccattgttgcatgggtttccttcccctgtttggacacccggagggtcttgcttcgtctctttctgcctccgtttcactaatttctcactgctgtcggtgttcctttcataagtccttttgagaagagttctgaaattgcattggtgttgccacgtcatcagtctctgtttgtcattttataaatacctctgcaatatctcgactgttctaaggcttggccaactccatgctgctagctgaggttagagattccagaaagagtttcagaaggtggcagctgctcttatatcctgtgagtctgtatctcactttcaaggcaaatccaaagcacatcatctctggagagtaagaattatagtcataagctgggctctggtgctcagccagtagtggtaataccagctacttaggaggctgaggcaggaagatcacttgagcccaggaggtcaaggctgcagtgcaccacgatcatacctgtgaattgccatgcactccagcctgggcaacatggcaagaccccctttcaaaaaaaaagagaagaaagaaagaattatagtcacgtactgcataaccacagactacatgctgtatttttactgtaacttttctttgtttagatacacaaatactcaccattgtgttacatttgcctgtggtatttattgtagtcacatggtacattacaaacatgttgtacgggtttgtagactagtaacagtaggctataccgtatggccgatgtgtgtagtaggctgtagtatctcagtttgtgtaagttcactcagcagcgttcacacgacgacaaaatcacccagtgacatatttctcagaacatatccctgtcattaagcaaagcatgagtatatttcagcaaatcatttactcagcctgtactttatgtcagtgactttctaagcatttcatgtgcatttttcttctataatcattaaaaagcaaaaccattccttaggccctcgtatctgccctagtttctagatgaggaaggtcacacacagtgaccgagccacttggccagtcccacacctagaatgtggcaaagcagcattctaatctaggcgattcagggcccacgattttcacctgggctgcttttagaaccttcgagcttttggtctgcacctatctaagtaaagatcacctttcacctggccatctttccttcaggcctcctcagctgggtgattcctgcctgacagccatctgtgtaaacagtgatcattgttcagaaacaagaaatgcacttgctgagccaagcactgagaatggtgtaggcagagtgggtgctcgcctgtgactaccgaagcggcacgcagcagctgcagcccaccaccttggggcctgcacaggtgtctgtcgctcgtcctggcttccagcatcaagagacagacttctccaggctgcatcttctggagactggctcagcaggggcgcaggctcctgctttgtggaatgcacgctccctcagggcccaggggaagggagggatggtgctttgtaattgttgctgttcttgttgatttgcctttgtgctgggaattgtagtgcagacggtagtgaccaacacacacaaagcacagtgcggcacaacgcacttcaacgcactgtaatccaccaggtgcggacacacctccttcagcacgcgccccttgttgtcccgtccagcaaaaggacagctcggccacagcaggtgaagccacctgcccaagtgtccagcgcccgctattgggtgaagctgggacccgagcccagccacagctcctggcctcggagatgcctgcgggagaagagaggtgaatttaaactggaaatctgcctcaaaagagctggcatcttcttagtggtggggccgagcaccccgcaagccccagcagggcagctgtgtgctgggcccttccttctgttggtgtgagcgttaagagcctaaggcaacatcaagacatgcactaacagcggtgcggtggctcatacctgtaatcccagcactttggaaggccaagatgggaggatcacttgagtccaggagtttgagaccagcctggacaacacaacaacacccctttctccacaaaaaatacaaaaattagccaggtgtggtggcgcgcacctgtggtgccagctactcaggaggctgaagtgggaggatttcttgagcccagggggtcggggctgcagtgagccatgatcacacgactgcgctccagcctggctgacagagtgagaccgtctgtctcaaaaaccaaaacgaaaagaaaaaaaaacattaacctcgaagggccttggctactaaagaaaacgtttgcttcccacgtagtggcgtggattcagaatcttcaaagccacggaaaattacacacagccagctggtgtcgccccctcaggagccacccagggcctctgcctagggctttcgtattctctttgtcacaacgatagcaacaggagactctggatttcccccaggaaagtccccaggcagttcagaagttgtctttgcaagacactggcaggacagcctcagggctttgtgctgtctgaggggcctctccaggggcatgagttctgctccgcttgtggaggtgacaggagatccaggacaaagcccccggagcctgagataagactgccttgaccttcaggccacgcggcacacacgtgtggagggtcagccctatttgttgtagtcttcatgccacttgataagccttcagcccttcatagtccatttgcaaattttatttctaaatagcaaaacctgcataagaaatacatgacgatgtcctaccccaatgcttaaattttctcaggcacatacagtgcctagaaatgtgatttgtttaaaattgtccgcataaaagggattcagtgcccactctgtgctcagtcgggccatggtcccggtgccggggacaaagacacagacctcgtgacgaagaaggtcatggtctagtggggtaaatggagaagcaaaaatcatgagtggagtggggcacgcatgcagtggtgacggagggccttggcagcccggagacggcccgtggggctcagccgtgggagacagaggcctcctggcagcttgggcttcccggctgggtggtgaaggcagctgagaggtttgccacgggacatcgagtgccaaagggcatggcgccatctacatatgagcagagacatgatctgggttgtcgaagtgtaagggagcagcttggagcttggggcggggtgtgggggctcgtggtctgggagtcaacctcacactctgggcaaacgatgggcgctgacttggagccccgtggagcttgatgcatgcacctgtctgtttctcgggggaaaggcatgtggtataaaggtggagccatgacacacccacttagtaggctcagcactgcctccatctggggcctgtctcttactctagggcttgtgaatccaacctaaggcatctgagggagcatccccaacccctcagccttcccttcccttcccttcccttcccttcccttcccttcccttcccttcccatcccttcccttcccccttgctaagcccttgcagctcctcacatctgcttggtccacagctttgtggctcaaaacaatagaaattccagcatcaggaaacctgcctgctccatcctcctaatgactgaggttggggagataattaggattttcattctaaagacattccccaaagtgcatgggagtaaataaaagaatgggccataccacgcagagaactgattatgtcagacccaaattgagtatgagattcgccagtgtaccacaaaataaataacccctaggaatcaagtccataatatgaaaatttaactggctcaaccttcagacatccttggtgctagtgactcccaaggaaggacagagatgtcaacagaattctaagcctgaccagcagctcttcctcccatcccagccccctagccttttttacattattggggtgcaggaaatatgtctaaaatgtaaaaggaatgacttttgattagcagccagcttgataattttgttatgtaagacacgtgcatcctggtgtgggacagtgtgttgaatgactgcaaaggagcttctgtgttcaggaccggaagaggaacagggttcatgaattgggcctcccacatatctaagcataaaatgctcacttaaaatttcagcgcaagaggttaagtttgatggcaaagtccagctcagtgcagagagaccatccacaaagacctccccacctggtccctaggctgttttcagttttggcggggtgggtgggttgtttttgtttttgtttttttgtaattatagaagtctgcagtgttctaagaggataggtttcacaatgggaccaaaatatccccatctgaccaaacactgggttctgcagaatcttctccagaagattatgtcaaactctagatactacctttaaggaaactaacaggaaataaacatgccatgcatgccgttttgcagcgtgacctaatcagaagctgcaattgtatattcctgattataacaggagatacgatcaatttaatttgtgtctgtgctcatttttttcaagagactgaaattattcaaaattaaattcacttattagaaggagactcagggagttagacttaacaagtggtgacctgtgccaacttcaagtcagaaaagctcactgtgtcccacatgcaccggtggtgttgtttttgatgtcccaccccctctcacctctttaggaacccaccagtctttcccatgaagttaaaaatgcctcaccccagccatgagctccctccagcttcctttaggtccatctcagccctttccttgtctcctttccccacctcccacccactccgatgctggctctgggcactgcattgccccagaacctcagccaggtcctggctgcccccaagcagatggagggtattcagctccctagatgttctccccacatcctcaacatgtttcttctttccctccatctcagaacatgcttttcttcgctctcaggactctcctgagcttttctccaagctttttggtgtctgctctctcttgtcagattcctacccctgcaccccagcatcaagtggcggtgggggttccgcacaccttggtcttaggccttcacactctattctctttccttaggaaagcatttttcaaactgcaggtctcaacctttgattgggtcagaatattcacttaaagggccatcatatccatttcctaggctggtctgccataacagtgaacacaaaccgggtggcttgaattgattgtctcacagttatggagggcagaattcccaaatcaaggtgtgggcagtgttggttccttctggaggttctgagggagaagctattccctgcctctctcctggcttccggtggctgccccggtctttggcattccgtggcttgtggctgttttactccaatccctgccccatcttcctgtggccttcttctttgtgtcttcctatgtgtctgtgtctctcaatctccctctccttataaggacagaggtcactggatctagaggccactctactccagtatgacttcatcttaccttgagtacatctgcaaagactctatttccaaataaggtcacagtcatggataccagggtttaggacttcaacatagctttaaaggggagacaatccaacccacactagtcatgaccaatagacttttcttttcttttttcagtgaaatagaatctaggaaaaaatatcagcattcattgcaggcagtaaggttaagcatcatttcataaaactttatacacatgcatgtatattaatatatgtgctggttaatacatgtattttttatgtcagaaaagtttatgaaacttaaaaaaaaagtggcggcagcggggacgctttaaaaaaaacctgcctcctgcagcctctgctcacggtgcacccctcaccccctggtctctcaaacaggagccagctctgtgttctgtagccccacccaccaggcactcccctactccctccctgccatggggccttggcgcctgctggtcctcctgcccagaatgctcttccctaccctcttcgtccagatttcgtctctccttcaaatctcagagcaaatattattgtcctagagaactcctgccagagccaagctgagcccactgttacattttctcacagttcccatgttttccctataaagccatgatcctggcttttgcagaaacaattcctctatgtatctatccgtgtttatcttgtgtgattattttattaatgttcgtctctcctaccatgctcatagcccactgtggtttgtgagtcttgtctgttctccatatcatagtaatattaatattccaatatgaatattcatatttccacattagctttgtgtctggcccaagtgctcaataaatgttcactaaatgaatcgatctaaatgaccattgcaaccatgagaggaatattgtgcccagcctgagattttaaaggaaggacctagagtggctccagtgcttgccagatagacagggacatcatcactctcttgttgttcacaaaagcctaggattgagcaccatgcaccattctggcagcactacagatgaggagactgagggtcagagtggtcaagtaaattgcccggtgtgcttagattcaggctcaggctggccttacccccaagcctgagctatcactcgggggtatgtttcttggagtgaaggtgcaagaaaccaggtgctaagattaggccacagggaccaaattcacacgattttatgtccgggttacagcctggatgtgggatcccagatctccctggacgataggaagtgtgcctcctaagcgtaggttctcctgctcactcacaccgtgggtgggctcaggtaagaagctctgggcagagcacggtgaccccagctctaggccatcctggctcggtggagtcgggcatgtgtgttccccactgtgaatctcagctcttattgagaaaatgggcacagaaatgtcagcttgctcagctcatagtcttattccaaaatcaagtgaaaggaaagcactttgaaagatgtgacgctgtgtcgtgctgtggaggcatggaaagtccctgtcctgggggtgcgtgctgtgggtgtgggagtctgaggacttggattctctactctccttcccggtgaggatggccatgtcattttgcttctctcctgtatgactagtgcagtccccttggctgtttattgctagagaggaacttagttatggtccccaggactgccaccagcccggggttctgcttccaggcaataagctttattagccctacgctctcaattatccttttttcctcctccatgggaagaactaagaaatggcttgggaagcccccttgaggtctggtgacagctgtgactttatttggggattactctggggcatgtatagattcatcaaagctcccttcttattaaaaccaaggaaaagatccctctcactgccagggacctccagccggcccttcccctcacagctccccactcttcctcactgctgctgctcccttgtcctatttgacaattaaaaccgcatctttagcaccttgatgcccgcaggcccggctctcctgaggggtgggctcttgtatccttgctaatcccccagttctcaaatactaccagcaactgtcatcttccacctacaggacagtaaagtctatctgagaatggaaatccctcacccctcagcctccttcaccacccaagggagaagcactgtgcagggaggcggggaggggtggggagcatcggggaggggtggggaggagcagcatccgggagaggtggggagcatcggggaggggtggggaggggtggggagaagtggggagcatcggggaggggtggggaggggtgggaagcatcggggaggggtgaagaggagcggggaggggtggggaggggcaaagaggatggggaggagcggatgcacctggcctcccaaatccagattgtggtgccagctctggaaacacagcaagtcactcctgaattacccaaaccgcaagtggaaaatccactgcagctgagtatcatgtactttaggatgtctgaactttaggatttccctgggatcattatcattctaatcattctgggacctgagagaagtaactgagtcgggggccagcaaggcacagacactgatgaagttcagcctagcagtggccagtttttttttcttgatacagagtctttctctgtcgcccaggctggagtgcagtggcgagatctcagctcgctacaacctccgccgcccaggttcaagcaattcttctgcctcagactcccaagtagctgggattacagacatgtgccaccacgcccagctaatttttgtatttttagtggagacggggtttcaccatgttggccaggctggtcttgacttcctgacctcaggtgatccacctgcctcggcctcccaaagtgctgggattacagacgtgagccaccgcacctggcctgggccttcctattttgagggaatcatcccagaatgagaagaactctgtgtagctgggatgtgagaagcatgtgcagagcttgagtgggtcagtacatgctaggccgatcccactgtgagcatttcacctctgctgggggacatgggcgcagggggtgtttgtgttcaggggggccacctctttctgatgccactttcctgggcttgtccaacccctgcttggctggaaggggactcacccacctgcacatcgagaacctcaccaacctcagaggaaagattagaacagggcttcaccacagttttgctttctgtgtgtcccacccctgggaaatgctgcaaggacgtcagcctgccaggtcaccctgcagccaactgcatcctttcccagccctggccgcagcagctgctgggatccctttgtcattagtgcaggagcaaaatgggaatgggggagccagcactacaagcctccaagcagtgttcaggtcgtgtgtttcctgggcaattggggggcgtgagttatgcagggcgctttcctctctcccacccacccaagtccagtagctttgctgcctgcgtgctttccccaaccatggacgggcctctcctaccatggcctcaatgctgggccgtctccccagctgagatgccccctccttaaccgagtctgcctgcatcagtgctcacctggtttagggctgcgcttagagctagcgtgtcctggtagggagtggcctaggctccagttccttttcttcaccagcactgtgggccaaggcgcatggcctcccacgcaccacagcagagctgccaggtgagattgatcttctgtggttgagatgatcactcttggctgtagcccactcatgccgtgagtgacagacaggtgcttagggcaccagagtcttctctaataaggtggcagctggccgcggttgttgatttaccggccaggatcttcgcctcaagaaccacagtgcgctcttctgtaatcagtgctttccttctcacatctcctgacacgaggatgagcagagcaggctcgatgacacagctgctcaactgtaatcctgtatgataattttgcaaattattatttttaatatcagctttttccttaggcaataaaagaaaaagttaaattgctcacaaactaataaaggtttatcttctggagcatcaaattctgtttactcatgaaacacacacctcctctatgcacccatcgagaggaaaattagcatttattttccctgataaacaaaaacagtggaagatttgttggcatcttttggtgttaagcccttccttacatttaaaatgacatagaggaatgcaagaactttggaagaggtctgccctgactctggatttaattttaactttggaaagcaacctgttgtgtgcagtaggatgttatgtggtgtctgcagtgcctagacgctaacgacatgcatggaaccaagctcccccttgggcccaggagccaagagattgaagaaagggaaatgctttcatgactctccacaagttcctccacgttcccaccggggggaagatgttgtgtaaccctcagtgatgagaaagtgagatttcccccagctagattcctcctcctttgattcattttggtggcaagagaagttgaagctttgacactctctttatttgcctcagtgctagaaggctttaattgcacttaaaaataattccagtccgattttcaaatgccttccggagtgattcagcgtttttcttttccctgatttccaggtacggagatatgaggagacagattggctttgaaatcagagacatgtggtacaaccttggtgagtagcctggatgtgggggcatagtgaatatcttgcatccctggtgggtcatggcactggccgtgttcatcagtgttgggatgtcttaagatcttaatggcttctgttccttggacagcagttgctactctttgtagtaactgttttcaggaattaagagatagaagaccaaaggcaaggaaagaaaatctcacgggtggggcaaaaagaaaaatccacagagcaccctcttgtgttgtgtggacacgtggcttggagctcctccctccctggtgttgcctccctccctcagttgcctcagttccttctgcgtcaaataggaagctcatcctgctgtgacatttgccatcacttaccatattcagttttacagactctgccttctaaagggttaattcccctcctcaaaaccagatctacctggtggcagcctaacatgctcctgcactcaaagcagtgaagggtctgtgtgtgtatatgaaattaataggagtttatttgtaaattaagtaattttttccaactacttttatcatgaacagtaagaataaattctctattaaaattttaaccaatgtgacatgtaattcttatagataagccccttcaagaaatcaatgactgacaataacttggtatcttcccagcatctttacactaccctctaggaatctggcctcactcctcgttgagatgaagctctctctggctcctgccgtcagccctcgggcttgctttgtgccgaggtgtcctaggccatggggtgctggtggccttgcctcagtcctgagcaaagcatcagttgcttttctgccccaggatctccaggcctctgcttccttccttcaaatggacacgagaagcctgcattggcctgttgcaagaaaccctccactctcccctctacctcagagaatcttttcctactagaaggaggcaggggtctgtccgcatcactctgttagcctcgtagcattagggtttcacttgttgcaccagggttgggacaacttagctgcaccccagcctgcttacttcccaagcagctgtgactccctgcagtggctggagagcatggcaagaaagaagcagaacccagcgagccacgcttcacttctagctcactgtttgcttttgcatcttccttgccattctttggtttgacatgaggcccagttaggttctcaggaatggaaagccacagcagatgctcctgggtggggatgaagagcgggtcagagtggccctgtctgcctgtgccctcccagtacaaagagaacctgcaccattgcatcctttctgcgtgtcagtcctggagtcagtggaggactcctcgaggaagctctgtgctaggtctctgcacatgattttgctgcagtagctcctatgtccagaatctgagtactgggtctcagctgtcaaagggcctgctgatctctgcaacatgatacctaccaggcaccatcctgtccttggccttcctgccatcccagggaggaaggtaggggctctaggctcagagtcaagagagatgataagtcccaccttgaagttttcatcctctcccactcctgcctccccgtgaggcctgattcacatggctcagtctttctgggccgttagataaagtggttggactgaatttttcaagagccttccaattccaaaactcaataattctatgacatatatatacgatgatctcagtaataacgtgctaaggcttttagaacagggaggaggaccatccgtgattcattccaattgatctctctgtgttctttgttaaaatcctgctctgacagatgcatctgtcatttgctctgttaggccagacggcaggccccacaccaggcagggacccagtgtggtcccatgagagagagagagaggcaggagacgggggagggctttcacagcaatggcatggaggggggctgttctctgttggaactcagtgagtccaggacttttataggcaccaacgttcatgaaggaggtgatatgagctccacctgccacagttgggctctcagggcagaccccagacctcttctctggacacaggctctctctgaggccatcttttaccctggcccctcctaaaagagtgagtccattttcttctgtgttgttccatttcaactctaaagtatagacagggaattgcctatttcccccaagaggacacttgcacatatactttcaaatgaaggttctcattctggaatggctcggtaacatttcacatcatttatgataattagagacaccaccctagcggagggtctgatgggtcattacatactgaaatgcttccttctccccgtacacaactgcagccaccatttgactcaccctggcccctgagcacccccaggatcctccactgctctccatgtgccaaggtcattgcctagcaccaagggagcctctaaaactcagctcgagccacagctggccagaggtcaccctgactgatgggtgctcctgcctttctagttttctgatttgggattgtttttgtttttgtttgcaagtatagttaatgtcacctctgtagtccctgagattgatcaccactgaaagtggctccatttcaatttgtgctacgtgccatgataacaatgaaggaaggaaaggcgggcccagaaagggtgagtttctccgcgtgccctctccaagtgcttgggcaggcctggccttctgaggatacacttgggtctgacacagagcacttggttctcttgacgttatctgtcatgctccagataggccaagtcaagcgacaggagacttttgatttggaaaaggttgcagtgaagtgagcaagctccccccttccctcctatcagtggctgatttgaatatggtgattaatgcatgaggtgtgtgttttgcagctttttagccaggaacactgactgtggcctgagaagcggccaagaggtcaaaagtaaaccaaagccaattagggtcagggacttggaaacaacaagaagtaacagtcagccaccagacttgggttccttgctggtaaaataagttatctttcaaagtgagggaggtgatcttaaaagcacctgcagcccacaggatcctccccaagcagcccctcaggatggctaaggatagcaccacggggtggcctccttcctgccatggtgccaggtgcctgagtgtctttgccaaggctgtcacactccaaatttatgacagcacatctcagtttcccaggatgtatacaacctactttctacatagtttttttttttttattttaattttactttttgtaaatgggtgcaggtttgggaacatattggcaggatgatagcaccgactctgccaagaaaatagaaatggaaatcagatctatttatctgcttacaattaataaactgtcacttgagcagaccttcagctgaatgctccatgagtctcctccttcagtctttccaatagtatgcatggcccatagagaggagcatctcagctcttgcctcctccttgcccagcctcagagcaaggatctggggtctgttttgctcaatttaatgcaagggcaaacatggcactgccccatgggacagagtgatgtgtttctttccctcccaaacctgtcatattttgagtctgaaaggggaaatcaaaagcaggctctctctcaaaagaaaaaaggggggaaaatgtgcttatttacccagctcctgagttatttatcaaagcgcactctgtgcagcagcctgccggagcacctgatctccttgcctgtgccgcctcaatttacattttgtttattacatccagcacactggagcgagcactagaccccagccagccagaacgaatgtgcttggagcaagatctttatccaccgcgttgggtttgggatatttttcatgcagggattcccttcatgggtgttttttggcgactgggcaaattgtgtgcttttcattaaaacccgtatacattgtggcctaatgggtgtggccaggtggtggaagcttttgctctgcctgctcttgtgtatacagagatttttctgggataagtctatgtttaatgtcccagatttttgaacaccagtgattgcaaagagataatttaaacacccacagggaggcttctgactagggaggccttggcttcgtgagaaaacaagatgttgttcccaggggaaagagctccacgttctgtaactaaaatagactctagatgggctatgagaccggcaaggactggaagtaaaatattctcctcgtcaccttcctttggctcaaaagtgtgtcctctttttctttaagtctacactgcaggagtcaccttggtcctcattggttccaaacctgagttcatcattaaatttgagcaagatatgctccaggggaaatctataatgcaaatgtcaaaaaaaaaaaaggtggctaccagagaacattccccacccactcctgctcaccttggggaccactggtttacgaagagtcagtgcccagggctgtcactatccatagaacccagtaccagctccaggccagtgtgtcttctgtactaataaggagggtgataataaaaggttaagctactgtcgttttggtagcttctttttccaatccctgcttctacaaccacttgtgactgctttctatgtttttcccagcttggaacaataaaacctgttggtgacagacagaactttatgacgctgaaattgtggttgatgaacaactcgctgtcaccatcatctgttttctgaaacattggctctgacattttttaggcataatacaaggaaagtgtcacctgagagatggaatataatagcattttcaagagaatgctttgcagcagttacaggactttcagaaacattaagcatttgggaaagtggtgagaatcacacaatgatagccttagtcaaaatattaattatttagtaaaagttgaaaataagatgttaattacattttgtgtgtatgtccacccaataaaaagtaattcagtctaattatgaggattacgtattctcttaagtatcgttatagtagccacatttctttaatgattctctttacagaaatgtatattcactgagttgcaaagaaaactaaagaatttggtttcctgattgtgtagaaatattaataagattggttaattcgggatacattgctggtgttaaaatactgcacatattttattcaaacatttaatttctcaggcattcttctgttatatgttggaaatgaaatggttttagttgcagtggggtgaaatgaaaacaaaatcaagatttctgaaagacaagagggtcagcttttaaaagatcacctttttgataggacctgcctctgagtttcattatgtcaccttaactaaggttcgcagccccatttttagaaaggagtcttccaggagcttcattccagaggtgcagtgtccaggcagtgaaagaagcttggcagttgctgtggtttcctccctctcccatctctctgaacttgcctggttcacttcaagctctttaggagctcaccctgatcctcaggagtaccgcagccacgcacccacaggatatggggtccccggctggggtgagcacaatggcggccaacccacaactagcaggagggggaggggctggccaccacatcaggcccagctgccagctgctctgcccagtcgccagatttcctgatggtgatcctgcgctagcatctttctaagtcagcgacagagacccaggaaggtatgataccaagatttccaacaaaaaccattgaaattaaaaacataaattgagtgcttgtgagaagccagtctctaccttctgggggcttatttagcattgtgatgtctcaacagtgagggataaaacgatggaaaatgacagatcactgacctctctgttcattttgcaattaggggggacaaataagggagtggacagctcaaacgatttctctttcagagagtcgggtagggtccgagtgccatgcaaagatcctgagacaagcaaacagggaaggaatttgtaaaatgagggtcacagctaagccttcataatctcagacccaggttcaaatcctgcttctccacttctctgaacagctcacagaacagctttgggtacagcccactttcctcgtctgtttaacaggttaagaaggtaaccatctcgtaaggttaccgtgaaaattcagtgagatgatgctttatcttgagcttgtcatgtaaattgtaaatgctaactaatatgatcatattcagtattattcacatttgaaaaacttttgagaaacatttttctgagttctttaaaaatcatatctggaacaagataggtgaaatgagattaataaagtagttctttttttttttttttttttttttttgagacagagtcttgctctgtcgcccaggctggagtgcactggcgtgatcttggctcactgcgacctcttcctcccaggttcacgccattctcctgcctcagcctcccaggtagctgggactacaggcgcccgctaccacgcccagctgatttttttgtatttttagtagagacggtgtctcaccgtgttagccaggatggtctcgatctcctgacctcgtgatctgcccgccttggcctcccaaagtgctgggattacaggcgtgagccaccacacccggcctaaagtagttatttaaataagcattttcctatcaaacaatagctcgaaaaggtagaatcactgctgtttttagggtttcagcctcagattccggcgccttgatttactttgattggagtcgtttggcatgttgcagaaatcaccctgcattatttacagaggtgtcagatagcaaactcatcttcataagatgtgggagataaagaggactcaagagactatctgctctctctcatttgtcggctcctgttcctgtcgctgtgcacagagttagaggctgagacccccgactcgcagcccctgctctattcagaattgggaattagctgcatgtgttctgaatctgtgtgatggaactggctacttataaaacagtgttcatcttctctgacagagaagtcatgattacaggcttataccgcgcggatctttgaagagcttcacttataacatgtggaatacaggccacttcttatactaatggctgggaaagttcaaaatcatcatctgcagacgcgaaatggatgcacattttcgggatcctgctgctcaaagtcacagtgatctgtgttgtgttgttttatccatttaagcccattttagaattctatttttctttatttctgaatattgtacctcttttttccaaggtcaacacaagataaagttcattccagaaatggtgggcccaatattagaaatgacattaattcccgagacggagctgcgcaaagccaccatccccatcttctttgatatgatgcagtgtgaattccattcgacccgaagcttccaaatggtaaggacgtagatgtgcagcgagtggccgggggacatgagggaggcaaacctgaaaaccttcaaagaaacctgtagacagttctagagttaaaggtgccaacgtggaaaacacattttcctacagcttgagagagaaaaagcctatgattttccttattgaagaagcttatcatcccttgcactcaatttttgggaggattattctcaatttttagctcttacttacttcttttaatctgggtttacttacacattgcaccctggataaaagtctcttgctcccacttcttggtacgtgctcttgtagagcgtttaatcaaatgttatgtgttacattctctcagaccggctgcttattgcagaattgtggtattttgaaagctaaagtctttgcttttattctcttaagtgtgtgtcttgttcttttgcctgtgcaatggaactgatgaaaattctctaagaaagtgtatataaagtgctcaaaacatactgtgacaaacagcatgagggacaaactctgctgcataacttatgctcaagaagtaacaaaatctccttctggatcccaagaaaataagtatactgtttatgtattcttgggttggcacccacacccacacatacacacacacacacacatgtacatccccacacacacacatacacatccccacacacacacacatgtacatctccacacacacatatacacatgcacatccccccacacacatacacatgtgcatccccacatacacatacacatacacatccccccccacacacacacgcacatccccacacacacacacacatgcacctccccccacacacacacacgtacatccccacatatacacatatgtgcacacatacacacacatgcacatgctatgactttctccttagtgtactaatggtttggccatgatgctttgcaggagacctgggagaagcccaagtactagggagtcctctgaattgaaagataccttttaaaaatcattatactggaccggatgtggttgcccacgcctgtaatcctagcactttgagaggccaaggcaggcagatcacttgagctcaggagttcgagaccagcctgggaaacatggtgagactccgtctctacaaaaaatacaaaaattagtgaggcatggtggtgcacacctgtggtcagggaagtcaaggctgcagtgagctgtgatcacgccactgcactcccgcctaggtgacagagccagaccctgtctctaaataaataaataaataaatattaaaaattattatagcaattcaagtaagtcaacatactaagcattttacatagattttagaggaatttggagaaaaattcctataatgaaaggaaatcaaaacttcatcaatcaagatagcttaatgttggtgagatctaatattaaagggtatattatccttacccacctctacagtttatcatttaagggagctttgagtagtttatagattttcattggtcatcttcatcatatcacatgaaggcggtatccacgaagaatgattttgctgtttcctagaacagaaaagagagatacgaaaccaaaacagtctccacactgtgagttgagtttagatactgagggcagggagactgagattcacaggcttagccaggtattatctgggtcctcagcaaatcactcaacatcttttaagtctccaattcaagcttgtaacattggcatgaaatagaatctaccagaaaggcgtgttgtgagaatgaaataaaatcagacctgtacaatccctagcacggtgcctggcactataaaaggtggctgtggatgcttctcttctctcaaggccggaacctcccttggtctgggtgtttgtggagtgcagggggcagcctgcagggtgagcccccagtgtctgcaggaccatggggcccaacgctgcatacaaacctgggcatggccatttcgtcagggttgttccggaagccggggaggagcacacaggagatgaacagagtctgactgctggagccgtttcctttaacctctacacacccacagctgtgcttgaaaacccattgcagaggagcctaacacctggctcggagatcattatttgttttttgcactttgctccactaggcagttttttaattttttttttatttttttgagacggagtctcgctctgttgccaggcaggaatgcagtgacgcgatctcagctcactacagcctccacatcccgggttcaagtgattctcctgcctcagcctctgagtagctgggattacaggtgcgtgccaccacgcctggctaatttttgtatttttagtagagacggtgtttcaccacgttggccaggatgatcttgatctcttgacctcatgatccactcgcctcagcctcccaaagtgctgtgattacaggcgtgagccaccgtgcccagccctaggcagttttttataaggtgactggtgactgttattttcacattattccaaccgtggacagtagagagggctttagtttaacttccccagtgtaatgtcagttggactggaatgagtggtgttagtacctcctcccttcttccttcctccctccctccctttcttccttctttcctcccttccttctttcctcccgttctctctctttttttccatgatagcagaaggtctccctgtatttatttttaataatattaaagataattcatttttgaaagaacagctgtttttgtttctctggctcactgtcagtctgtgtatatacaaagtctttgtataaagactgtactaatacaacattgtaaatattatacctagattttttttattaatgttctttctgtttgataatatatcaaggagctttcccttaattacaacatagcaaccatgatattaatgatggcataaaattaactatcactttcttatccatcgcctataaatgggcatgtaagttgtttgcagattttcactgctgtgaataactgtgcagtgaacacattcatgcatatagcttgaatttattttgaaaattttcccagtatacattcttataaatgtaattacggatttcaaatatttttgtaacttttgaaattattgccaaatggtttgatgttaatacgataagatttgccccatctccattgctgctggcactatatcatggccccagtttcactgccaactcattggaactacaaattataatttaaatgctttttcctaggcagaaaattcatttgactttttgaattttatataaatctagcccaaagaaggactttgtgaaaaattgctattaaagaatcaggttaagggggaaagtgtatttatatagataaatgtcactggcacagaaaactaaggtcaaaagtgtttaaaacatcattctatttgtcattttttaatcagtctttgggtcaaaataaggtcaagggcagttagaataaagaagaatgagagtttggtttctgaattgttccccttttccctcacattcttttgtctcatggctgccttgtggtagtttaaaaaatcttacaacaatcttctgaggaagtgcttcattttctccagtttgcaggggccccaggtttgctaggaaatggtccgaagttaacgagagccacagaatttgtgccaccattttaaacaccgccttcccattggggcttcaacattgacccagcgtcaggagacatctttccagaaaaccaaattgtttttgagtaatatcatgaagtaattggcacatttagttccatctcataaacaacaaactatttcactagcatgaaacatgccgtgcttggatgtatgtaaatccaagcataagcctgaagacacagattcacccacaagaaggacccactgtcaggctgagcgtggtcagctacctgaactgttggttcagagtcacctgtttctctgtgttgtcatctgcttgaacctctgcagacgagggatagcgtacattaaagatctttaaaatgagggcagaaaaactaacccttgttttaaaaaaatccctcttgtatgttaatctgcttctgtaattgggaaaagatcagttttcttctgtttgatgtgcccacctcagcttcccagctggaatctcccaagcctgcagcatcatccccttttctgccagtctccttgtcactgggttttccggctgcgggtcatgctggactggcctttgcttgctcccctggcctccgtggcagtcggttgtgaagcttcatcagtcctccctctgtctcatctgcagcctccgtcctctgcgcaatcaccattgcactagtccaggattattcctgggccacagtatttgtctcttgacttgctctatctatgttttctaagtcctttctgactccagttccacctgtccctctcagctggtcttcctaaagcacaagggatggcccctattgtcggtgatgtgggcgaatgtgtagagtggacatgtgtgtggcacattggtgcagggttggccccacctgcttctccatccacgagcttctgggatggggatggtcggctgctgcctaactcctctgccataagcccagttacctcaccttattagtcacgtcagcaggggcttaagttttttttatagcttttatagcagatgtgcaaaccctactggagtagggggaagatattagggggatttgtttttacaacactttagtgttttgaacccgtgatagagcttatgttttaaaggttgctgtgtcttttggagtagagctgtcaatatgctactgtttatggaatatgaaataatatatatgtccaggtgtattttactcttacaattggagtagagaggagacctgctggattcagaagaaaaacctgctattttactcaggattaaactgcaccaaaccattactggaattttaaaagcatgtgttacaaattggcttttctaacgttgcccggagtttctgctcttgtgctcgtgctcttcagccgcagtggcgggcatttcattagaacgttctttcccttacacctccccaagagcctactcctttcctgtctccacttgtgcaagaaagagcacaaatgttccttcggaataggctcagccttgcccttatcctgcttctccagggtccatgtgttgaatgggctctcttggtggcgggatggggtggcatggagttatcctttcatgggccatgtcctccttgtggcctgggactctctgtccagcgctgcagtgagtgccttaggtcagcttgacagcactcgctctggggaggtggcgatgaagctccacaaaaggctccaggctgaaggtccctgatgctagtggaagcctgctgtgaagtgtcgtgttctgcaggagctgggccagacagaagcctgtgagatgggaggccccagatgtgcacagcggccttgaattctttttagaagtccctcctaccttcaaagtcatatgcttcactgtgggctgggtccatagccatagagctccggtccgttgacaggaaggcgttcccagcgactggacgctgcatgacgctcttgcaatctcacacctctctgccatcccatccctgtttgtgtacggccaggaggctgctgcctgtggggtttcttttcctcctagtgcttgcagtgtggatactccaagccaggggaggtggggatacatgtgggaagccccagtggatgcccactgcagccatgcccctggggtggcccccagccctgtggccactgtcagccaccccctccatcactgggcactcttgtgccacttccctgccctgtccatactcaaggccactgtggacatctggggcctcctatctcataggcatctgtctggccaagctcctgccagaacatggcccttcacaggggaagttccattagcatcagagaccttccgtctggaggccttggcagagcttcatcaccacctccccagagccagctctgtcaagctgacctaaggcactcactgcagctcctcaacaaaaacccatttcttatttcttctgcctcttttgtctctgggtgctccagctgtctgtggtcatcctggctcttccagcactttctatgaatcttttatgatccggatgccccagccattctcctaaatcatcctcccctgctgcttcttcctgtcctggtgcctaagggcacattctctgccccctttccttacagctggccaactcctcgagacaccaccacagctgcgttcatcccaccccctcgccctgtgcccaccccaatccagagagtagcatgcttacccctaaactcaggactctaggaatctccatttgtttgaaaggagaggtcctacttgggaagatttcaggactgataagctggcaggggaaatgtggagaggcattggggtcttcgcgccccttatcccatccacctggatgagcctgcccttggtcacaggagatgagccctctcctggccttaagctgactctccctgcctcaccaagaaccctgccctcccgtggaccgcactccaagtctcaccctcatactggattttgcttcataataaaaagcatacttttaaattccctcctggcatctttttaaagaattccatttgttacgcctttggaaaatacagaactaacagctgagaattgcagcaaatgaccatatgggccatagaccattaataaaaatggaatggaaaaagctgcccagcaaaaataatattttcaatcatggagctattttctgtcatctttgtgaggctcagtaaaatgctgcacaacttccagaaattcccatttagttgtaacagtattagaacatgaataatctttgtgtcatcagtgttgccgagctcctgtttgaataatctcttcacactgcccatgccagtaaccggaagccagtaattgaatagccgggtgaatgtcagcggctctgccacttggtggaaaggccaatgtattttccactgtaatatgaatgtgaatgagtttggtagcaattctatcttgtgtattctttaattcattaggattttatttgttggtttgtttatttttgctttcaatgtcaaaataattcttgcctaaagaggaaatatggcacaagaggcttctgtttcattgaatccagacccaaagatggtctgagaggccatggaaaccaagatccttgactccaggagctgcgattatattgaatttcattcttaaaagccctccagcaaagagattcttccataatcccctttaaccagattaaacaggactaattttgaggccatgttcccagagtcctctggaattgcatgcagccctaaagtcactctttaatctgtgtcatgtagacataaggagccgctgcacctgtctcaggcatcagcaaggtgtcatggcctgcgatgcagccatgcatccccagccaggcagctccaagtgagtggctctgggtcctccaggctcatgagtgtttcacaggagctccaaggtcagcaagccccttgcttgacggacgtaggaggatgtggaggtttttgaatgtgggatgaagtgccaccgattaattagtgtgtaattaagtttccagagcagttaggcaagaggaatgctctatacataaagatatgaatgtgtctgagcacaggtactcaaggctgagtgatggatcgggagggaccagtcacttgtaggatgtcagcatgggcgcctagagccccaagggttgtgcggtgtcacacttctctctgctgaaccttgcctgtttcatcttcttaaccatgttttccacccagatacagtccagcaactttctcccacccacctccccctgcacatgctcagggggtaaggtgtggttgcgcagtttcatcagattggccccgacccagggagagaaggcagagagagtctgattccttggtgccctctgcctgcagtatcttctgagcatttcttctttaaatacaggagaaactagagcactctgggcaaagagcagcattgtactaaggtttatttttaaagggtcaaataagcccttctgctaatgtacttagcagatcatgtccatagatttcagatctcacccggctcttgataacctcggagccctccatcaaggcggtgagtggtctgtgcaaacctttccaccctggcccagcctcctgctgcgctcccacagaaccctagagctcttctggtatataaagcatggtcctggatgtctggcaagtgcaggctgattttatacattacagatgtataaaattatagatgcattagagtaagaatagtaaatctcacccaaaacaaaaattatgcgttccaaaccaaatataattggcttttggattagctactactgggatccttctctccatgatctttcaaataggtgccaatagcctatggttagctgtggcagtgagtggtaaaagcagtgtttcctttttaagttaattgaattaacaagacgtcaatatcgcttcgagcacagccccctgactccgtcacgtcaatttaacagcaactttccgaaaggccttctattcataagtgttctcttgtttcatgttctcagagggctgctggtatcagacactgagagactctctgttcagtattttcagttggacaccctgtgaatatttttggagcaatattagtgattcagaaaagagaagaaaatataatggttttgcttattacgtgagtgagcctctgccaccttttgagcaacacagtaaacccttgctaattttatcccagccatagagaaccttgttgcaaatcaccagacaatgtgcatttatgaggaagataataagcatgattttgataaaaccagctctgctctatcagcaaatgtactatctccaatttagtgggacaggatcatttaattctgattatagtaacagttcatagcacactagcgaatcaattcgagtgtattctataaaaatgaacgaggatcctggaattagaggctagttgtggatctctggtactgaatccttgctaataaacagatcagggtggccaggtgtttgtgtaaattacttagtttggactagggttagtaaaattagaatcagctgtgttgtgatttacttaccactcatccacctttgttggaaatcattaagttcatcagtcagaatttgatcagcagcatacctaggtagctgtagcttcctcattgcctgtgtttgtgacagctagatttacatggaagcagagaaaacatgccgttttcataacctacactctgtgttcagatccctttggcttgaccattgatgggcattttaaatgcctgtatgtttgcccatgtcaggagaaggcacatttctctgcattctctgtacctttcttgttgtctgtactcattaaacatacatgaaattgaatcatgttttgattaaatttaatttaattttgtgtctctattatttgtcctgaagcatcagccctcatcaaacatttaatctttgaagtctgtctggatcatggcaccatctgggagatggcactgccttgaaatgccaacttttgggctactaccaagcgatctcccttgtatgtgattccaaaaagaactaccttttgcagaattcttttctgtaaagggcaggatagcagtggttagtatcaaaaggttgttattttacagtaaaaatcgttaatgtgagatttcaggagaaaaaaaatctaaagcaattcattcctccttcttcaatagaaccatctgtctgtgctgctaaaatccttgaacttcttaggccagacagaatcaaaaagaagtgtttatttgggggaggagaccatggagaagatcaagaagaaaattggagagattcactaaggtccgggttctggggatgttgctgagtccttgatgtcaggcaagaatcagtacttctctccagccctgaaagcctttgtttcatctgtagctgtggctttgggcagtgtgtactgatcgaggacaggcagggcgtctgtgtccatttggaggcccctccttgggtttcaccgttccttgctaattgcttctcaggggtccacagtcagctgctcctgcaggggcatccccaagtctctggtgcccacagtgtctgtcacaggcactctggatgagcagttttcacgactgggcttggcctggccaagaatgcaggttgtgatttatcaaccctctagaccgctcctttgctgacatattaagccctctccagctttatccagtctaagcactttaatccaatctaagttggtctaagaccaactgtattcagtagtttatgtgcacacagcacattcattccattagagcatcaaaggcactgtttgaggttttggggctggctagagcaatgaccaaagaaaaattcttcctctcactcagcttaaattccactgggatcctaataacagcaggcggcttgagaattgttgcctgagaaagtaggtgattgaacatggctttagagagatcctggagacccttgcatacatgcccatggcgtacttgctttctgaaccctggattcagctttcttcaattcttcctttgtccatcttccttcagtttagagtgtgcatgtctcatctttatgggaatgaacaatctcacagcccctccttgctactggcacaagttgatggtaacctcagggccccctgcagcatggctagtcaccaggccggagtcccagtactcagatggctatgaactctgccagagatggggaactgggcagtgaggatggggaaaacatgtccattgttatcgaggtttttttcagcctgatcagacacttgaagacattttagagatttccaccccccagaatttagagtttttctaaaagcatggatctgagacataattagctggtactggcgacccttctgcaccctgattcccaggaaatttaatcagaagctttggggatggaggataggctggagatggaccttcttgaggtgcctgctggtctgtctttagggacattgctcctcttgctctttagaacattttttcagccagagtgaggtatttcactaggatctatcaaggaatggcagctaagtggcccctaggatgttttcagattgccgagaactcttcactggcaggggaaacaccatctgttcatttcaggaaccaacaagctattttagatgttacgtgtttgtagagatgaagtttgagactttttttcatgctgcgctttgatttttttttccccctatggtttccttgtctttcttcccctggttcttgctcctgctatcaggacgtgcaggttcaggctccattaaccagaaaaggaaatgagaggtccccctatggcaagggatcatcagaaacctccaggggttctgtgttggcaactcttaaatgaggcttcaaaggcagagggtagccatctatgatgatctctcttgccgatttatgttctattgacactcaagtcataaaatgaaatactcgccatgctgattatttacgcttcctctgtttaattatagtttgaaaatgagatcatcaccaagctggatcatgaagtcgaaggaggcagaggagacgaacagtacaaagtgttatttgataaaatgtaagtgttgattagcagtgggatttatgtctgagagatacagagacagagagaccgtaattagactacaatgaactttgtaacccagaaataattaaaatgtgttaataatggaaaatagttaaaattgcacctctgttgagtttctttttctgagtgtgattaacaaggtgtgtataattatttttcagccttctggaacactgcaggaagcacaaatacctcgccaaaacaggagaaacttttgtaaaactcgttgtgcgcttaatggaaaggcttttggattatagaaccatcatgcacgacgagaacaaagaaaaccgcatgagctgcaccgtcaatgtgctggtgagtgaaagcttaatcacgttttttcagttttcacagcacaccagaaactgaagcggggattgccccagcccttatctatgacagtcagccacgaagctttccaccgcagaacaatctccttcgcttgtttcctcatctgctgcagggaaggaatcatgaagtcgtccactctgaataagtctgtaaaattgtcccatctctggacgttttaatgtcgctctccttgtcgttgtgaatgatgactcaccgtatcttgcagccagggtagtgcctcatggattacggccttaaggctttgtgattaggagaccataaacgcgtgctatgtagtacataggctgaatggtggcctcaaaggtagagcaataccccagtccttagaacctgtgaatgagaccttatttggaaacaagaggccctgcaaatataattaaaaagaatctcagatgggattatcctggattacctgcaaggggaggggagaggtactaactccaatgacaggtgtcctcataagagacaaaagagaagacacagaaacaggctagaccttgtgaagatggaggcagagattggagggacccagtctcaagccaaggaatgcctggagccaccagaagcctgcggaggccaggaaggatccccccctagagctttctaggggaacgttgtcctactcacaccttgatttcagattctggcctctggaactgtgagaagaaacatatctgttgttttaggtttatggtaatttgttacagcagccacaggaaaccagatctgggcaccatggagaacagacgcctgggcgaccttggctgctgccatctgtctgccttttgcattcctgctgttgccctgatacagctgggttctgtggacacccccttcctgatgtcattgtggtccctaatccaggaaatccattagtaccaatgagcttttgggaagctttaccacaagctcagatcccggccagcctcatggctctcagcagcgttgtgattcccacagcctggctccagagctctctgcttctccctttgctgcttctcttataaagaaacacaagggctgactcgtggccatagtagggctttcctcaagtttccttgcctgtcccatggcaagaatgcaagaaaacactactcctgctttgctctacttacctcccttctctgcccagccactggcctcaggatttcagagtcgccaacaacatgtggatacatagtcctcactgccacatccaccccttgtgtggacttgtgggtgctttatgctcatggaaatggactttcatgccaggaggaacatgacacatcattcactctttaaaaagccagagttgtgtggattaaaaagataaacgaaaaggaatgctttcacttttcatcgactatggtatcagtgctggatctgtgctttgccatgaggaacttcacagctgaaagctcatgagcagtcttcgccccttcattgcatggctggacagcttgtttaggctaatgataaacatttctgtaacaagttttcttttccttaaaaatctaaatataggggaccagtttttggtccagcatgtaaagagcttgcaaattgtcactcctgtcctcacaacaagaaaaaagctgaacaaattgaaaacaatcaacaattattagttccgtcttcttagatctgtagataaacttctgaccccaaagtcaaagaaacaggaggatacagagaaccacagagtggaagcccaaacagaaaccaccactggagccagtactagattccttttacccagtccatcatattcactttcaacgcattagtacaatgcacgctaaagacaaaaacacagtgaaggggcagagcaggcattagaaccagactctgatacggcagaggttttgaaatcatcagacctgcaatttaaaacagctgtgatgaatatcctaagggctctaatgggaaaagtagataaaacataaaagaaggtgggtaaactacgtagaaactcacagaaatcatcaagaagaaattctggaaatctaaaacactgtaacagtgtgaagaatgcctctgatggtctcatcaatcaactggacacagaatctgtggacttgaaaaatctgaatgtttgcagatgcatcatgtgtcttaggctactgtagaaattactggtctctgatgtctggccctgaggtctgggctgtggctgtgtttgtctttatattcacctggagactgaccaagtggtacagcagcaagctctgccccaggtcagttggtctgatcttacagacagaaaagaacctggcgcttacttcactgtcttcttgcattctgaccaacgttcaaagtaatttgttgtcatggtgccaatgtgattgacgtgaaataggaactattatttttctatgggaaagaaatggagaactttacaaaatccttccctactatggacataactttatagtgttccttctaatccttaaggggatctaagaggctgataagtgcccagaaggaagaattatcaataagtttattagtcttccaactttgatgattgagacttttatttgttttaagcaagatctcttatgctcaccaggacatgaaacagtggagaaatggtggtgtgctctgaatatgggctcttactacctgaatctagggtcaggaaacaaactcttgtaataaaacctacaatcacggtttctaatgtgaacctgtgttcctctttaattcagagccagactcagtgcccacgtacttttactgtggtcagcacttgctcagttttaactaagaaacacaccctgggttctcaaggttatctgacattattaactttcttcaaatgggaacgtcctgaatcatttgatgaaaaatcaaatgttctgctcttaaccatttcctggggatgataaaatggatcccaactgtcacagttttttcatttagaaaataaatctgtggaataaagggaaacaagaaaccagagttttaaagataggtagataggtgtcctaaccatagatactcactgcccagctcaatttcctggtcagtttttcccttttctcctggtacttttattacagaaacagagtgtaatagagatgggtatgtataaccatctctaaatgaatatagatgtatacatattggagatgtataaaatatactctgttagtcactaagaagaaatgaagcctaaagttaaaaaattaaattaataaaataaagaacatagaatttaccaatgctctgtaagtctgttgccaagtttcctttagaaccagcttcgtggtttcttacaaaacacagttagtggaacattgtaagttgtgtaggctccttcatgtcctattttcttgcccttaaaaaaacaaaaataggtccgggtgtggtggctcacgcctgttgcactttgggaggccaaggagggaggatcacttgaggtcaggagtttgataccagcctggccaacatggtaaaaccccatctctactaaaaatacaaaaattagctgggcatggtgttgggtgcctgtaatcccaggtactcgggaggctgaggcaacagaatagcttgaactcgggaggcggaggttgcagtgagcctagatcacaccactgcactccagcctgggcaacagaggtagactctgtctcaaaaaaaaaaaaaaaaaagaagaaagaaaatgaaaaagtaagagacgcagcagtcactctgcttggccacctaagtccccaggacatctcctgcaaggatgtctgcatgtatgttggaacttggatgtatatttgtaattctttaactagaatttcactgacagctcataatcgagcatctttaattattggtcactaatgttgctgagtgtcacttagtgcttctgtgcagtcatccacacgtcccatctctgtgactggtaggcgcatcattactttgcacatgccagttacttctcttcatagccccttggcaaggctaattaaatgcagagtggggtccagtatttttaaaatcttggtatctgttttagtccaaaatggaaatataatgcagatgtctgcgttctaaaagatcaatgcctagcggtggattggagttggggggccggtcccaatggggttcctctgggagctgagctgcaagcttggcacagatgtcagtcagcgctggtgtggggggacttgagagacaaggctgcccgcggagcccaggaggagtgggagcaccgcgtgaacctttacgtaagaaacacaaaggttttatatagaaattgggattggagatgagtgtacttcggttgtggagaggttttgaagtcctaggaagggaacaggactcagcacaggcagaaaatagaagacatttcgtatctccgagagaggaatgaaggtcgcatgatattcccgttgtgaaattgtaaagaaaaatgatcaaaaccttagaaaggattaaaaatatgagtacaaaaggggatggtgtgaaaccgtagcttgtaaatactggcaactttgagttggaaatgaagggcttatcctctgcctttgatgcagattctctttgttgcgacagtgagttgtcagctgaaaatatcctcattactgagccgtgtcatatgaactggaggacagtaaagtgtcagaggcaacagaacttgaaaatcttggtgcatttttctaaatgtgcccccgcttattttctagacttagttatcatttcttttcagagacatcaattgtagaagcaatgctgggttttgctcatgaaattaaagagcctatgccatttcttggataattgtatgtctctgtaatggtgatattcactagttacttcaggctccgattctagagggctaacatcatttttaggtgctaaatttcacattgaaagtgactctgatgtttccttaccttaggccttgtgaggtgacttctgtgcctctctggtggctcctgtgtgaaaaagattttaaagtgtttatggagatgttcaccttaagaaatataattttgatagaaatgttattgctcaaccagacgatattttccagtaaatatgtagaaataatccattggttttaatctactaattaagctttctccatcagtgtttatacacagggggctttttcagaggcagccctctttttttaactgtggtttggaaggtttgcctgtctggaacagtgctatctaccagaaagttctgggataatggaaatgtcttgtgtagactgtttgatacagtagactagccgcatgtggctgttaagcgctccaagtgtggcaagtgcagctggggaagtgaattatttattcaatgttagttaaatttactttaccttttaatatatgtggctactggctagtgtattgcataactcaggtctgtattatcatattgtctttgtagctcttgctgaggctgggcccagaaagctttaaatcatgttgatgatgcttatttgcttattcccaaatttgggatatttatttatgtattcatttattctgatgagattactatggctaagatatcatgtcttcatgtctttttgggcaataccttgttttaattgaagacaagtgactttcaagtgacagaagttgattttagtcatcacagtgttcagtgtagaaatgtaattgtgtttgactagcaaaaaaaaaagtgaagaactgtgtaagatggttttgcaatttatgtgaatttatggttctgatccaaagagctgggtccatttggctgtgtttgacacaagatgaagtatcttgaatttttattgtgcatgtgataccttttgtggaacagatttcttaaaacagtattatggtttaacttttcagaatttctacaaagaaattgaaagagaagaaatgtatataaggtatgtatgcatcacgcttgtctgcatgttaattataaataataatatatgttgtatgtttacgtatgctaagaaatgtgttatagccgcaaaggtttattttgtagaaaattgtgaaacgtataaggtagagtttggtggagctcccagatacattctcagctcttgcatagcttgtccacaccagtgcagagttcttggtggtcaccattagccaactcaaaagcaaaactacaaataattgtttcacagcgttttgtacctgttgaccaactcatgtggcccttttgcaaaaagataagcacataaattttaatgtttcacagtaagttatatgatccagtgagaaatccagttataactttaccagacataggggagttataatttttcagtctgctcttagttaactgacgccatagtcccgtgttttttatgtctttcttccatgaagaagagaaacattttgcattgcctgctggattttgcttccctactcgccttgctccctggagtgagggactgtgattgagcccttctctcttggttacttctaaagtctcgtgtcaaataattagcaagattaccactctggagactaggagaaggatgtaacctacacagcatgagtttttagtgatgtgtttattacactgagggtgattgtctaattttctatttctaagattgtttttacttctcctttttaagaacatactatgtgaatttaataactcagttacctttatttctttatggcaaagaaattctttcgatcacattgactgtaatcattggagctctttattctgatggatttgtatttttacggatttttttgtgcatttggactcagtagaaatgcagaaaatcacaatcaagtattgtgtgtctcattaaaaatgtttaagggaaaatgaaaaggaatgaaaaatttgaaggaaaattctacctttgtgtatcatctttatttttttcctgagtttttcttagtgctttctgtaccaaaagtttttaaggcattttgaattatgaacattgtaaaaaggaagtgtagccatgatttactgttgaacatagaatttagctcttgcaatcctcaacacaaattatttagtgacattttaagaacatacctctgttttattgtctcaggtatttgtacaagctctgtgacctgcacaaggagtgtgataactacaccgaagcggcttacaccttgcttctccatgcaaagcttcttaaggtaatgtcaattaccagtcaccttgatgattctattgttataaattctaacaatattcagaattgtatttttccatggcaaattttagtaggcctataacttaaggttttatgaaattgactaaataaatgcaaggatatgaacaaaaatatttaggaagtactttgattagagatttgtccctgctgaatgcagatttaattagatgtcatagcaggtgatcactgagcattataaactcccatcacttggctgtgagctgacagcaagttagagattctacaattccttgttcaggactacaggactccaggatggtggagaacaatatcaagaaggaattttcctggtagaacagctaagagataggatgagacatacccctaattgtcttagtaaagagttagggaccagatcatgacttttcactctatcagttcacgttgagacctcctgctagtgctctctgcctgattcttctaaggagtgttgctcctagcacaagtctggcatgacaactgtctactcttagtggttcttttattactcagatagcttcagacattgactttctttgtttacagtgacgtatggatggatggatggatggatggatggatggatggatggacaaattgctatacagcctctagttttatatttcacaacctcagtaagttattagatgatcttgctcatgacatccttataaaaatttgaaaaattatgaactggataaataagaacagttacaagaattagaatttagtttggtggcattccacaaagactgctcattcaaggagtcatgtttccaaatccaagccagcctcccaaaaaccaaaaatgtaatgaaagaaaaccagagaaaattacattaaatgggcattcagtagtgtcaattaggtaataggagttaaggaagacattgtgttatggagtaaaactctggtaagactctttccatctttggcccgatcctgaaatttctgatagtttctgtgacacaaatatacacaggctgccctagagacctgcgagtatggaaatttgcctctgcctggaaacagcagtgtctgttacaaataaaacacacaaagctcagctcagtctggagggacctcatcagttgtcctcctgaggctggctgtctgaggacccattttgccccgtgccacgtgggctctcccaaggagcataatttataaggatggaaatttcagttggtacatctgataccagctatcccactatgaattctgatggccttcatttattcaaaactcaaatttcagtagcaaggtgttttttgcaaatgtgaagctatttcttttaccccagggaaattaaaatggggttgacaaactgctcactcaacccttactccgtccctcatagaacgtaaacttttatatgcatgtgtgaatgtaaaacatatatatgtgcataaaggcatcatttgtttaatcattggatttattgagtacagatgggtttgtcacaaactgcatgatggtttgtttcacaactcaaatcgataggcccaattgcattgctgtttcccctgggcttctgaattttccagtttaatggggaatgctacataatctctctccatatcttttgccccgttacattttgcaattttttctaaatatgttttgatattactgtaaatgtgaattcatgctaatcacctcactaaagaacatgatttatgttgttgcgaaaattcttcagtatgacagatatattattgtttattaactgaaaatcctcaaatagaatcttcttttttggttaggcatatctttcgtcaaaaccaagagcaataaaaactttagtttttcgcctagcaatcaaattattacatctccatgtggaagtggaaggtagagaggatttttgcttccctagtccatgttttcatttgcaaaagtgatttaaaaatgcaaggaagtcatttggattctgaacttgcttgttcttaatttattttattgtggttacatttcagaatctagttttgcttttattctccatcctccaataaaagtagaccaattatgttgtacaaacttcaaagttaaagagtttgtccaattgtgatggagatatgcaagttcaattttaaggtgaaaaatcttgcagaccgcttaaaggcttctcactcttgcctgacctttctggaaaggcagagccatacagggcccgtgccctgtgcctgggagccctgatgtccagcgggaggtgctccccagcccgtggtttcaggaaagtggggcgggacctttgctaagacagtaagcagctgacggagccttgccccgttgcccggaccccagcttcccacttagtgcctttgcagcaccctccctggcctggctgaaaacagggtcaagctccctctcctagggccagcaataagcaagcccatgctcaccgtgtcctcccgtgagcctccaggctgcccagtgggagcacatgcctcctgcccgtaggtgcccatggagtctttttcacagtgttctttttcttgttctgtttttttttcttcttcttcctgtagaagggtcttgctctgttgtccaggctagagtgcagtagcctggtcctagctcacgcagtgttgttctgtgtcattattctctaatgtagaatcgcaccatcctgggagtcaggcatcttccgcctcctctttgacctggtttgtggcacacagcaggtcctcatcaaatagctgctgaattttattgaaccttatacttaatgccactgatgtgttgagcccaagttcaggagctgacacgttgtatctgttaagtggccttgccttccctctggcatgtctcctcgtgcatcttcagctcacacgccgactgcaccaatgcttccaggaatactggccaaaccctgactctgtgcccagcaccttgcctatggctgatggtgcaaagacacctccccatctttaaggagcttgacagcctttctagtccctttctgggtgacttgtgtgttccatgtaccatctttgctgttgattaaaatgccaacccacgcagcactgagaccagagccctggggtgccgctcttgggatggccctggatcacctggctcctgatttgtcccggaatgttaggaggtgtcatttgcaagctgccagttccgtgctttgcagaacctgctgggtttttcttttgtctgaaccccactgcagctatgcctcccctgtgtcttttatgcctgtcggtatgtccggacagaggctctgccctggcagtccccagcctgttgacagcagccacacatgtctccagaaccgcggcccacacgcgtgtccgatgcgaagctcacaccattctgacgtccctgggtgtttccgcctcgggtccgctcatgctatgcttctcccttagtggtcggaggatgtgtgtgtggcccacctcacccagcgggacgggtaccaggccaccacgcagggacagctgaaggagcagctctaccaggaaatcatccactacttcgacaaaggcaaggtaaaacacaaaaagcaattgtccttgttttcctctttccatgcacctacctgcagtgttgtaaacacgttttttagcgtgtgatttttgcagaaccagaaatttgttacaagttgtatattgaaatgttttatgcatgttccttcagcttgcacttaaaagtagaaatcttcttttaaaaaaaatcaatagcccttttatagatgctctaaaaaagcaccaagtatttttataacccttaccagagggaactaagtctggaacactgattcggaggtgtttccgtgcccacagagctaatgtattcctttgacatcctgcatttttctgttggcacggaagaattaatcccatggtaggatggatattgctccatcctggtggcttctagtttaattggcttaaacaaaattatagattccacttgacttccactaaaaggaaacctgctgtcattttaatcagccagtattatatctgatcactgtagttcttctgattaaggtatgcagtaactatttaaaaaaaaaagctgtttcagtttcagaagtttttaaaacctgccaccgaagtgacattggaactccttctttggtttcatcaagattcctaactcatttcagaacctgttttatttttctttttttcctttgagaaaactgactagcacactttatgaaggtaccgacgttcacatcctagggctgctgtagcacaaactgggtggctttcaacaacgggaatgtattctcatagcttagtgctgggagctgcaagcctgatgtcacagtgttggcgtggccgccccctctgaaggctgcaggggaaaatctgccccgtgccttttcctttgggtgtgttgctggcggtctctggcactggtcatctgtaaccacatcgctccaagcccttcctccgtcatcacaggccttctcctcatgcgagtttctgtctcagtctccttctccttaggaggtaccagcggttagacgagggcccactctcctccatcaggtcctcatcttcccttgattacatccaaataccctgtttccaaataaggtcagattcagaaatatcaggggttaggactttaaatatttctggggacacagtcctacccacaattgtactgatgcccgggagtgatgatggctgcccctttttgtggctgttgacgtaaaccaaaccccattgaaaacaatgactcgacagagtccccgtggtcacgagcttgggattctgctcacatttggagtaagcgatgcggcatcctttatttgtccctgccattcttgacacagggagaaagtctgacgttttcagaatggcatgtgggctcccaaaggctggttggaaataaggattggaaatgttctgtgaattacacccagtcctgtagtttaggggtccccaaaccccaggtcctcagcctctggtacaggtcgtggcctgttaggaaccaggctgcacagcagcaggtgagcaacgggtgagcaagcaaagcttcatctgtgtttacagccgttccccatcgcccgcattaccacctgagctccacctcctgccagatcagcagcaccattagattctcacaggagaatgatacctattgtgaactgtgcgtgtgagggatctaggtgccatactcctcatgagaatctaatgcctgatgatctgtcactgtctcccatcttcccctgatgggatcatctagttgcaagaaaacaagttcaggctcccactgattctacatgatggtgagttgtataattatttcgttatgtattacaatgtaataataatagaaataaagtacacgatcaatgtaatgcccgtgaatcatcctgaaaccatcccccaccccggtccatggaaaaattttcctccctgaaaccagtccctggtgccaaaaaggttggggaccgctgctgtagtggaacaggatatatttttgttctctggaatgagaagctttgaggattagggccaattactataactgtactaggttagccaggagaatcctgtttctcagcaaactggtaaagaaatggagcaaatgcagccatcccttcccggcagtggcttcttggctccagggtgagcagtgctacagaatgggcagggcagggcagggcaggaggcagggaccctggggtggccgggaggcccgagggccagaggtcacgggactgaaggaatgtgcgcatttgttgatggctgttgccgggctctctttgtggcagcacatcctctgaccagcgttggctcccgcgacctctccaccctcattccctcccttgccctctgcattccagccacactggcccttctgcgtcctgaaatgcaccagccctctctgccactgcccagcgggtttctgctgcactgccttgaggacgttgcttgagtcagttttccttttgctgcctgtaccattttgtcacttgaattagctttttctaagccaggctttctcaatctgggcatgattggcattctgggctacctgttactttgtggtagaggaccacgcgtgcatggtggactcaaggaatgtctccctgcagtgccctgggcatactccttcctgtctcagcttaaatgtcacctgttctccagccacggaaacatcctcttttctcctttatggcacccactatcatttgcaatgatagatttgcttgtgtgtttctttaatgagttccccagtaggctctgagctctgtgaagatagaacctcacgcgtcaattccccaccatgcatctaatgctcggaacagtgcctggcacacagcacatgctcattacattatggacgtgtgtggaaagaatgaacaaatgaatgaaaagtcagcatttaacagtgcttcctgacagatgagaaatgctcatgtatggcaggacaggtggccttcaataaatgataaatcaaaaaacagagtctttttttttttttagcaaaggtagccaaatatcttttcctacattgtgatagttcatcaaaaaaatcatatggaggggcaaaacgaatgtgttcggttcagtacagtggttctcaactgagatctgcaggaggcattgtgggttctcctgactgggggaagagaaggtgctgttaaccctccagcagtgcacacatggcccccacaccacaaagaaatagcccagaatccctgtcgtgtccaggttgagaaagccctccttagaaaaaatgaattcaagtgatgaaatggaatgggcagctaaagcaaaacagactcaaggaatgtcctcagatgtccctgtgttttggtggagacagaacaaaggctatggcaaagtgatcattggctggccttgaatcagaatgagttttaggaggattttcttcgtagtagctgcattgataaaaccgatggaaaagccacttctgaatatccataatatttccacgagaatgttaaaaaggaacaaagcctccttatccctctaaaactaaagtaagatgaagaacaggtgctggaaagaatttgataaaatgaaatttgaagtatctgagtgatcagctgcaaggcaaaaaattcattttaacatcaacaagcattacattttctgggagaaagagcagtaggaaataattcatcttccgtaacaatctggatggcctgcactagagtttgaacctctccgaatctccatggctccaaacagcacaggtgtgtttctcacacatgctccgaatcctccttttggctcggaacccagatgaacagaggttccgccacagaggaacacagccggagaggacagcaaagagtcccccgccctggggcttctgccccaaaatgacagtgttcatgtcattggctgaaggagatcacatgatcaccccagacttcaaggggtggagaagtgcacttaggggcaggtgagtgtgagcggcacccacgtgcaccacacagcttgttagacaggtgagtctaacaatcaagggcaccatccaatctagattaacaaaagttcatctagaaatcccctaagtatgcatgtattctgagaaagacgacgtccacactagtctcccaaataactcggcttccccacaactagagatgtgagaataacatctcataaaacttgttgggcctcaatcctcgtttctctgtcgtggagtttccttcttccgttaaagagggggcttaggtaggcagaaccctgcaggagaagcagcctgagagaatgggctcctgacccccgtgactgcgatgtggggaatcccaccaggtggccagtgcaggaggaagggggcacacagtagaagctcgaagtgtgatgttttgtgccggacttagaatcacttttgtttaagaaacaaggctgaggcctgagtatccccggctgctttggggatgtgccatcatttgagaaataacgtcctcctgcctttcctaaatgcagtggaatgacaaaggccacggctgaaggttgagaagcttgaagttgggagggcccagggcacacctttccacactccattcccagactgtaattatcttgggggaaaaatactttttaaatggtccacaggtcatcacaggccttagtgggcaggtgacacagcccaaggaaacttgaaggagggccttgattggtgtggagccctgatatggtttcgatctgggtccctgcccaaatctgaagtcgttgtaatctccaatgttggaggtggggcctggtgggaggtgattgggtcataagggtggatttcctccttggtgctgtgtcgtgagagtgagtgagttcttgtgagatctgggttgttcaaaagtgtgtgggaccggccgggcgtggtggctcatgcctgtaatcccagcacttcgggctgaggcggggcagatcacctgaggtcaggagtttgagaccagcctggccaatatgacaaaaccccgtttctactgaaaatacaaaaattagcccatcgtggtggcaggcacctgtaatcccagctacttgggaggctgaggcatgagaatcgcttgaacctgggaggcggagattgcagtgagccgagattgagccactgcactccagcctgggcgacaggaactctgtctcaaacaaaaaaaaaaaagaggggctgtgagacctccctgccttctgctctcggtcctgtgcctgctttgccttccgccgtgagtataagctccctgacgcctccccagaagtggctgctgccatgcttcctgtacagcctatggaactgtgagctgattaaacctcttttctttatacattactcagtctcagatatttctttaagccctctgagcagctgagcaccagagaaaccaactctcaattaattggtaggactctaaccctcactgttgtccagtactgagtcctgagccacatgcggccattgggcccacgtgaaccatctttctaagaccaagtacaaaaaaacaaatgttcttatgggctgagttgcatccccccaaaattcctatgttgaaatcctaaccttcagtatttcaaaatatggctatatttggagatagggtctttaaagaggtaattaaggtaaaatgaggtcattagggtgggccctaatcgaatctgactggtgtccttataagaagggggattaggatacagacacacacagggaagaccatattgaggatacagcaagaaggcagccatctacaagccaacgagagaggactcagaggaaaccagccctgcagacactttgatcgcagaatcctggcctccagaacagtgaggaagtgaatgaatgtgacttgacgcccccagcacctactcagtgcttcattatggcagccctggcaaactaataccaataccaggtgtctcattcatttgtttgtatagatttcatgttgaaatagtaatattttagatagagtcaatattactacaattaattttactctttaaaaggtagcagctaggaaatgcaacattcacggatgtggctcctattggacggtggttcctgttggacggtgctgctctgagtcaaagactttgctcttgttgagcgccaagaacatcgtcagaccagcactgccgcccacatgcggctgggaagcggaagctgcccactgtcctgtggggcctcacaggcagtagaattgcctgcctgcctgttggtatctactccttagactacaggaatatttaaacagcgaaaatatttctgaaagagttacaaaatggggactcaagtctggaaagaataaaatgtatgtcgaaatggcaaggaaaaaagcatgatcacaagcaccaagatatgatgtttttttcctgtgactcaatttcatttctgtagtggtgaaacagctgtcaagactacggcagttaccagcgggaacctggagggaagggtgacttgggagttctcacatggcccttaaggaaatacagatgaggcaaataggagagaggtagaaacaggcagctgccaagataaggtgtaagaaatcaagaaaaagcagcatcttcttgttggagcaagacagagttttccgatacctattttattattaaaatttagaattatgcgcctcggtgatgttgttttcatttgtgctttggataaatcccattataatctcatttttcatttcccgggcttagcaaggataagtcacgtttgctcctcaggatctgtctatgcacgtgccttagggaatagcgagccttccccgctgacagactggctctaagatctgcaccatcttgacccacttctacctgggccacttctgaacaactcgggcctctgggcagaagccctgctgctagatccagttcactttgtgtctccttgtaagctctcggtccctctcacctgggtctgtctgagatccctacccactctcctccccaaggccccatgcctgtctccacccttccgctcctgcagatagatagcagtctggtttctaataaagtggcctctggatcacagcgtgaactgcttcaaagatgcccaaacctcagggattctcccatctcctctgcaggcgatccaggcctctcacctggcatgaggccccttagagtaggaatcgagcctccagatgtaccctctcatcacccacagcatctggccttctgaacatgccctctgttccccaagcccttgcaccttcccatggtctgccccggcgtggaccggctgcttcttgctgctgtctcgtgtgacggctgccatgacagctgccttcctgccttctgggcatatttcactgctctcaaactttcgtggcttttggagttcaccggcgaatcttgttaaaatccagattttgattcagctggtctggggtgggcctcgaggctctgcatttctgagaagctcccaggtgatgtcccagctgctccagggaccatccctgagtccccagggcctgtgctgacttaagctcctgagagcagaggcagtggctgtggctgccacctctggatctccctctgagggagctgtgccgtggcctgggctccactccatttttttaaatagctttttaagagtggttttaggctcacagcaacatggaacagtgagtacagccaggtcccagacaccccctgcccacacacatacacaggcacggggctttcagggtggtcatttgttagtgagttgagcacattctggccagcacttgagcaaacagcacacaatcaagaaggtggccgtcacccagactttccacaaagttccttatttggggcatattttgtttgttaacggatcttgcatcctgactcagactgagcccctgggagagcgaaaggccatgcctcccacctccccacccccagcgccgggtcgggggcagatcccaccccactctgccacgtgccgcatcacagttgggttttgtcagtgtgctcctttcccaaggctaacactaacttgactttagcacgacattcactgcaaaggttatggatcagacggagacaaattcttgcaagagcagggctggattttcctgtctagaatcttgtatgttaaaaataacaatcttccgtccaaatgactacagcagtttattaagtgaccgaacgggcagacaagcatgcagggagggccgtcagcatccacagaacttaccgacctgactgagagcgccacgtgcaccaggctcacgtcctgagcgtgtgcccacagcccttggagtgtttacaagaatttccttggttcgatcttacatgtatttcattttaggggaaacaacgcaattccagttttacaaatgtattggggtaaggagacttaagacctcagttaagcttggagaccagtgattaccggggcttgcaagatgataaaatggaagccaggtgggacgtcagtctggcaaaaccatgacccggctacagctccactgatccagcctgtctcctcgtggcccatttccatatgcaattaaggaaatcttcattacgtacttactctgtgggaaggatatacaccctagagctcattcactgtttgaaatgtctacagcttcctacgggaaataggggcttccagaatccaggacaagcttgcctctggacaaggctgagcaggctgttaagggagcaggggtccccatcccaggccccctgcgatggcatctctctgtgctccccgggagagtgggcgggggcagggagagacgggaatcgggtgatattaaagtttctctgcctttgtgcttggaaaccagcaaggcaaaatggatttgctgctgttttatattggacacgggcttttgaatgatgttctgttatctttctgtatttcttccccacggaatcattcttctgtttttgcctttccaccgttttttaaagttttgaatgtctttcagcctagctcttggtttcttaatctttttctttctctctgcaaaatgtcatttccatctgtttccattttcattcttttacgtttcctccttcccgagctaataatgactccttgctctttttccattccattcttgccgcccgcctgagtgtgccccaaaagccttctgtttggttttatcatggcagaccagtgttcttttctgaagatgctctgaattgtctgtcttattgtgtttggttgaggcctagtaattttcgataaagcccttaatccaagtacttgactgaaaattaccaggcttctctgtggaggatgagggtcaaaaatagaagtccttctatgaggaagatgcagtcagagtgagacagtcagtattagccaacaccagccacctctgaaatcaagaaacagcctggcaggttgacaaatgcgatacataatttgtagcccaagtgatatatgaagccctgtgactattttcagctggagctctgttgtattttcccttaaaataaccttcccttgacaaagttcacactttgccttgcaccaatgtaaaaaaaaaaaaaaaaaagcgttttacatcattgtgtaaactaaaaataggagtttggagcaaatttccatttttggtcaaatgtttgcatctcttttccaagtatttggggtgaaattttcacatcttctaagtttccctttggaaacacagttgttattaagagggactgcaggtcaacataatgaagccctcatatgggtttcttgttggcatttctagaatttttgaaaatgtgatattagcagaacctattcagccagaatttggcctgaatattcaaagagatcatatgttcattatgatttgctcctatgcagtaattgatcatcaaagcatgagaaagtccattttcgagtcagtaacaacaatgctcccttagcttatgtgggatcactaacaagcttttccacccaaagcccacagtgtgcccagtgccgtcctgcgccgtgaaataccgagatggagccaggcccacctcgaggcgattctagcatcagggctctcatatgagcagataaataacaaaacccaccttccgcccatcacacaggtgggcgctgggtctccctatcccacaggtgcaggagtgatgccttcttttggagagctagagaagacttcacagaggtggttacatttcgtgcttcttgaagagtaaaattaagtttgccagatgatggctgggaggaacaggaatttcagagtgtgagaatagcgccagaaggggaagagctcctgatgacatctcgcttttccggggaagtagagccattctgggagatagcagtgcaggggactgtcttcgtcccttcatgctcctataacaaaatgccacagactgggtggtttataaaccacagattcatttctcaccattctggacctgggaattcctagatcaaggcactcacagatttggtgtctggagagggccctctgcctgctccacataagtagtgccttctctgagtagtcatgtcctggcaggtgtggcggcgctcttccgggcctctgttttgaggccactcatcccattcatgagggctccaccgtcatgacctaatcaccttcgaaggcctcatctcctaatgccaacaccttgaaggtgaggatttcaacccgtgaatttgagggagacacaaatattcagagcatagcaaagacattggagctagtttgtcagtggccctgtattgtctcctgaagatttggcttacaaggacccaatggaaatttcgtgaaagtagaaaataatgatttcattttcctcttttcagggggtaattctggcaacatggtggcagcagacttagaggagggagggtgggagccagagacgagacgaggggtggggcattgggccaggcctgagccccataaagccagtggcagatggaagtgatgtcatgagacttcaagttagcagattccacagtgtcaaagacccttgaacagggttaaagccagaaaagcaagtgccaggggtggctggggcacccactggcctagaagccaagagttcttgccgggaggaagatgtaggaagggaatgcttcacttgctgcagagagcagatggaggtcctttcatcctttcagcattgagcaaggcagcgagggtgcacactgagcagtcctgtgcagggcatttaatggagggtgtcaaggaaagggagaaatgagcagggtcacagctgcagtgatgctgggtgcatagagagccctgggccagttcacagctgcagtgatgctgggtgtatagagagtcctgggctaggtcacagctgcagtgatgctggctgcattcaagaatcccgggccaggttacggctgcagtgatgctggctgcattcaagaatcctgggccagttcacagctgcagtgatgctgggtgcatagagagtcctgggccaggtcacagctgcagtgatgtttgttgactccccagcctgtgccctggatccccctatcccaggacatctcaccagcaagtctgcactctccctttgcagcacccatgtgttgttctctgtcagctcccaccctcccacctgcaaccatgccattattgctctcacctttaagaagagttctttcttgttccaactcccctgtccagccactgcccatttctcctcctctttctacaacactccgtaaaggatggtctgcacttgctgttcctctcctcctgttgtctctggagtccactccctcaccagtggccagtagctgcctgtggaaggcaggagtgagcagcacggtgtctctttctgtccagttaaagcaccgagcaagaggcaactgtatctcttgctgcctgctttagtcttttcaaggtctttctttgcaaaactacaaatgtcctggcctaaagaaaaaatgtcatatctctgttacaaaaaaaaaaaaaaaaaaatcttcatttttttatctagggcattacaagctcagtgagtagttttctgttttgactaataaggacttgccgtggaataaaggagacatgttgatgaacataagtgacccgggcagtgactcctatgtgatctgagcatgagttacacgggcagcgactcctatgtgatctgagcatgagttacacgggcagcgtctcctgtgatctgagcatcagttacacgggcagcgactcctatgtgatctgagcatgagttacacgggcggcgactcctatgtgatctgagcatgagttacacgggcagcgactcctatgtgatctgagcatcagttacacgggcggtgtctcctatgtgatctgagcatcagttacacgggcagcgactcctatgtgatctgagcatgagttacacgggcagcgtctcctgtgatctgagcatcagttacacgggcagcgactcctatgtgatctgagcatgagttacacgggcggcgactcctatgtgatctgagcatgagttacacgggcggcaactcctatgtgatctgagcatgagttacacgggcggtgtctcctatgtgatctgagcatgagttacacgggcagtgtctcctatgtgatctgagcatgagttacatgggcagcgactcctatgtgatctgagcatgagttacaagggcagtgtctcctatgtgatctgagcatgagttacacgggcagcaactcctatgtgatctgagcatgagttacacgggcggtgtctcctatgtgatctgagcatgagttacatgggcagtgtgtcctttgtgatctgagcatgagttacacgggcagcgtctcctatgtgatctgagcatgagttacacgggcagcgactcctatgtgatctcagcagcgtctcctgcatgacacaggtagtagctcctctatgacccgggcagcgactcctgtgtgacccgggcagcgactcctgtatgacacgggcagcgactcctgtatgacacgggcagtgactcctgtatgacacgggcagtgactcctgtatgacccgggcagcgactcctgtgtgacctgtgcatgtcctgggtagtgggtgctgcatgtcctgggcagtgactcctctatgacatgggtcatggctcctggatgacacaaatagtggctcctggatgacacaggaagcgactcctgtattacacaacagtgactccgatttggcaaggcagaggttcccgtgtgatggggctcctgtgtgacatgcagtggctccagtatgacattgaagtggctgatccatcttgtgcacacttggggtgactttggcatcattactgcaagatcagtcagctttgagctgcagaccgtctttgctggtgcagggaatcaggcctgagtctgtgtcagaaaggtctttgcaaaaagtcaatcctgcacccacatcagtcagtgccggttgagcactccaggaggaccaaggatgaggcttggctcaaggaaaaagcgaggggcctggagagagtggtgatgcttgcaaagggtctccattccttgcagcgtagttgcaggcaacaccaagactagctgggcccttggaatcatccaggcccacctcaccagggccgccagccccacacctggaagggatgctgtcactcagcacgcattgagcaaagaacggactgaacgcagcctcctgctagtcctgggcctccctggctcctgtgctgctgagggacctcccccagagttccagattcttccgcaccagtgattttaatccattttgatgtcagagacctgtgtgggactctggaaattcagaaggtaattgagtatgactcttttcccaataactgctgtgaaaaaacagaacagatgaattttagaagaatgtctgaaattcaagcatcctgtgaggtatctccactggtgagttacttacagctagtcagcaaatgaaaccagagtcgcccaccagtatcctggtgagtcatcgccagcctgaattattagaaagggatggctgtcccggctggcatctttcctttcatctgctgctgttcccttgtcctgtgacatccgtgttgtcatcctatcagaattgtcaacatcacctcatgggtaagaaatcaattcctgctgtgttctctacagctgcttctgtctgggaactaaggaaggagctttattataaaagaaaatttttattcaagtttctattcatggaacttgaagaaatggaacttcctgaaaccaagaggttcagaagaatagagagaagattatcatctcaagagaacacgtctcgtatcatctgggggaaagcagggtggggagaccgtgctccgtgctgcaagtcaaccggcaatttcaagaatgccgtaaattggattaaggatttcgcatcagaaaataaagctttctgctgatatggggctttttcatttggggctgtggcaaacctcataagcctgtagcacttctgagaacggagccaaaccagggtgttcaatcgcagaggttaaagtgattctttcactgagataatctaaatctagatcatattgaatctgccttctctctggcacggaaacattttccaaggtattcacgttggaagtatgaattacccacactctctttaaagccccatccaattaaaagtagatgaaaatctccttaatgcagagtcctttagaacatgccaggggtagcagggagggatgagagatatatatttataggaaatctgatagaagataccaccatgcaacctgagggtgagtctgagaagatatttactcatgacttgtatttcttttaaaaacaattacttttgatatgtatctaaagtatcttctctgtcatttaggataaaaacagattaggcttttactcaggaatgaattagaagccctggcattctaggcagctacagagtttgtatccgcttgcagaaaatttaaaaaaaaataagaagaagaatccagtgtaagagacctacaaggaaaggtaatgttctctttgaaatggaaatctgctcagagaggaagtggtcactggagctttaaaaaaacgttaaaagtagggaagttctcccttcctagaaaatgtgagccggggctctggcagaggacatacgaaagacttagagcagcagactgagatattccaggaatgggaggcaactttaaaccttcagcaggatgggggagacagacagatggggactctgggaagggaccaggtagcagagcagggaccgtaggcaggatgtcttgggccacctcctaccctccctggacactggtcccagctctgaaacctttgtcttctttgggcttacttttattttgttattcaaagtattaaaatgcagctctgattgtagaataacttttactctcatcaaaaaaaaaaaaaagcagatggtttctttacgtcgtggctatgacaagagtactttgggagcatttaagtaaaacagtgttcttaagtttattgggtggctctgaagtgagtgaggacttcagtggggtcatcctggaaaggaaaggcaaaggccagtgagcgggtgggggctcagtgccatgggtgacccaggtctggggcttggcagtctgcctcccctgtgggaacctgcagttcaaggccagcctggactcttttcaaatccatcctggcaggaggtggggaagcagcttggaagtgctgctatgtggccatcaggagcaaggactttcaaaaaggccacgctgggtcaagcccaccgcttatctgctgtgtgtccttggcaagctacttaccagtctgatccctagattccttatctgcaaaatgggtataatgcagatgcccacctgacaaggtgattggaggccttaaaccggagagcacaggtggctggacatagagtaagctgggaaaagccaaaatcacctttgcaaaaaaaattaacagtgaggaaatgatggcagtaaaagagatctgatctaaatcctcacccacctcccacccccagtcatgcctctcctgtaatcattcctgggctttggctaagccaactttgggagacctctagtttaaggtttaaatgataataggccttccctaaaactcagctgccttgataaagctaatgaaaggccatcaggctaggaagaggggagaaacctgaattctgctaaggtgtagactgctcacaaaatatacaacttcactatcgtagatgagccttttgagatcttttcaggttttttgcatgtctgacacctggctctacccagaccaccagccccactcctatggcccacctagaagcaactcagctcaagaggacagctctgaccccctgtgatttcatcagcagcaagcatccattacctggccgccaccaccccttctcccaaactgcctttgaaaagcccctcccctaggaacctttggggagattgatttgagtaatgacaccgtctcccacgtggcggtgttactggccgcaaatctgtatagctctgcagcaacctcagttctcaccttgtcagaagaaggaattcgattgaggggcataacgcagaagaagagaccgaggcaagtttcagagcaggagtgaaagtttattaaaaagttttagagcaggaatgaaaagaaagtacacttggaagagggccaagcagacatcttggaggtcaagtgccccatttgaccttggacttagggtttgatatgctggcctacttccagcgtcgtgcaccccttttccggtggaatgcccctggaaggttaccagttaaactccgccattttgcctctcaattcacatgcttgggcccactcacccagctcctgagatcttatcaggaagctgctgatcaccagcttgtgtttctagctcttgggaaactgcctttccctggcactgtctgtgaccaattattattttagagagacagtgtacacctgcctgaccatcatctgacggtcacctgactttcctggtagggtgtcaggacagccctctcctgccccgctcatgcctgactagctacctgctgtaacagcatggctggccttatgtcaattaaactctttctttactgcaatgccttgatctttttttgtgcagcaggcgggtgggggctcagtgccaagggtagtctagattcgcggcctagaaagcctggcctgttgggtggttccaaagctgcgtggttcccctcaggactggcgctaccgtcttgtgggaatgatggaagttgaatgcagcatataggaagctttcctgattgtaactcagcatcctgcagttctgttcactaaaccttgttaagcaggccctggattaaggtccagaggttttacaggttgataaagctgagcccctgtcctcaagggcttatattctctgaggaggaatgacaaagggtcatgctagtttcagtaccttaccaaaagttttgaggcagcaggatcctgggtctttgtgggagcacagaggaggagagtgggcggcagctaggaaggcttcctggaagaggtggttcctcttacttttccatggttttctccagtaatccgctttgtttttcccaagaaaaataagggaaattcaggccaactatctatcaaaaaattattccacatgtgtcaaaagcttatcaacattttaatcacttatttggaaagttacttaccttacaaagttcccccttttcaaaatgataacaggctttatatccatagcatagtcacacacatacatcaaactttctgcaagctttagtttagagtcgaagtctgccctgttatttctgatcattggtgatattcgacatagcattttttaggtggacagcttgggaaaagagccaagtcaggcgcccagtttctacataaatggcaccccacagcctctcttcaccctacggttccttttccctggctccaaggctgctccgacagacgggcttcgggccacagctggcagcaggagagcaaagacaggagcagtgaggactggctgacagactgctgttaccatggccagaggcctgcgtgattgacatgccagtgattgacctctttggccagctgatgccgcaggtcacgagccaaaagacatgagactcaagaaaatatttgtattttttcggtgttattcccataatgtttcattcaaatgtacttctacactgttttattttgaatgattgcattcctgtttgactctttgcacaattcaggcctcggcttctctttcttttctttattttaactcacagatgtgggaggaggccattgccttgggcaaggagctagccgagcagtatgagaacgaaatgtttgattatgagcaactcagcgaattgctggtgagtctttatttctttttatttaaatgaacacaggcaatctcagctggtttttcaggaatctctctttccatgtcaatgttagggttcaccccaggcactctgggaccttggccatgtccctccgttttgcctaggaagatggttttagttaatttgctggttgatatttggcccataaatatttactttttagtcccaagtcagctcttataaccaaactcttaaggcttctatgaataaattgtacgtaaacaactgctgaccttgtgtatagcggtcttgacagcccaggagtctgtgaacatttgtactagtttaaaactgaccccaggccaggcgcactggctcacgcctgtaatcccagcactttgggaggctaaggcaggcggatcacgaggtcaggagatcaagaccatcctggctaacacggtgaaaccccatctctactaaaaatacaacaaagtagccgggcgtggtagcacacgcctgtagtcctggctacttgggaggctgaggctggagaatcgcttgaacccaggaggtggaagttgcagtgagctgagatcgcgccaatgcactccagcctgggcaacagagtgagagtccgtctcaaaaaacaaaaaaacctgaccccttctatgagagagggatggatagataatgaccagacctttcttctgccatgggaatgctgttagtttctaattgctacctcctccaccttgtcatttttgtattcagcagatcaccttaatgatgtgggaatgtctgtcatgaatttagaacagaacgattctgttcctttaaattctctttgaacgtatcccactatctgacctataccttttaaaaaatactaagggccagccatttctatggcacttctttggttattgaaaacacccataagtcacaactttttgctgaatttgggctagttggttcagattcccttgcggaatgatggagaatgagtgaaaaataatgtcaaaacgatggagtgagatgaaattcaggtgcaagcctcagtaccctctcccaccatctccctctcccaccatctccccctcccaccctatagaagttgccagagcttttaaagagcccgcaagaagaatccagaggcacacatgcttgaatactcaaacctgaaatgcattttcttttttccttccagaaaaaacaggctcagttttatgaaaacatcgtcaaagtgatcaggcccaagcctgactattttgctgttggctactacggacaagggttccccacattcctgcgggtaaagtttggttctgcctaatctgagccatgattgttcccccagcagaaaatccccttcccgttctgaggaagggtggggagtttgcatccgcgtgggatcgtgcaactctctacactgccatagctcggtggttagcccggggggcagagaggggttgacaggattttatttggttgcatataacctttctatctgatttttccgtaaaaggaccctccttcagagatttacacgtattattttaattgaggtgtgatatatgatatgtgatactatttgccatcttagccatttttaggtgtgtagttcggtggcattaatacagtcacgttgttgtgcggccagcaccaccatctaccttcagaactttttcatcttgcaaaactgagattctgcatccattaaacacgaactccccattctccctcctgccagccccagcagccaccgttctactttgtgtctctatgaatctgactgttgtagggaccttgtattagtggaattgtacagtgttcgcccttctgtgtttggcttgtttcactcggccgaatgtcttccagtttcatccaggttgtagcatgtgtcagaactttatcctttttgaggctgaatggtatttcattgcatggagaggccacattttatttattcattgatccactgatgaacatttgggttgtccccgcccaatgtgctgctatgaagatgtatgtttttaattatatgggaaattggaaatggatctgtatggccacggtgctagaaactccaaaccaggctccatccctgagacaggcatgtgctttcagacatgtaattgaagcagtaaccgtgatcacctgccaggtgcccatttcccagtattcacatgaggccaaaggagaagttacataaatattaatagtgctgcctggcctaccatagaattgtttatacattttctcaagaacacattctttggatgccattgaccagtgggtcatgatttcctgatatttcttatgactttttttttttttttttggacacttggttttctcttatcctaggagactatgtgtgattgctctggctttaggaagcagaagctctgtgtcttgagcacagccgtctggggcagttgaaaccagttgggagattcccctggttccagacgttgttcatttggggtcctgtgtttccgactccacgggagtcactaatagtgtgacatctcttcatcacggcacccagaggatacagacctccccttaggaagggcatgtcactgttgacaggggagcaccacagttctggcctgctctaggaggtgaggctggctgcccactcagtgtcctgcctggtgacggaggcgtctggccctgtcctggtcactcctggtcactgctggtcagcttctcctcttgccttcatcgtgcagcaaagacagcggttgatcagaagcacagattctgaacaaagtcttcccttccaaagaatgaataaaggaggcttagttacaagctctaaattagagacaaatttgaaattagcttcattctcaataaaaaacaaagctgaagggtggaatgagcttggagttaaagccacttactgttgctaaaggctttaattcgagtgtgtgtgtgctccggaacatacatctttaggaaagggaggcaggtggaccctaagccatgcagccttgtgcagtgcttggtgttagatggtgcgtgtggcccctgtggatggagatctacctctggtatgtaggcaccaactctggatccgtgcaggatggttatcccagaatccagagcaagggagcagcctgcgtggaatattatgtgagggcagtgccgggtgcggaggacacgttgcagctcccgagccaatagatgccaggttgtgccaggagctcacacacagcaggctccaggggcggtgctgggtcatctccaccaccaaaaggacaaaatgaaaagtctgaatggaggttaacaggctcgattaatattgaactgactttcccgccacacctggatcattctgtgggtctgcagcaatatatttatcacacttcacagatgagctggcaggggtcaatctgccaatgacactggcagttaccaaaacgtgggcagaatgtttgcgtgcttcatgccctgctggagaggagcctccaagaactgactagctgtcccttttgctttgtttttctctaaaaattggtctcactgttttttgtgctcatgttgatatttatagaccttacaaggaataaatatctttgactatatgtacatttcccccttgttttcatgttcaaaaggatcacttcagaatgcaaagtaactgacattttcagaaaatgttattcgtgtttttacctataactcactagcttttttctattaaagtctttatatacatttttattattatgttttctcatgtaaagcataagaaaaatgcttgctagtttgatagtagtctgttatccattaaatcttactgaattttggaagtgcgtggctttatatagaagccttagaagttgctcagactgtatttaagatgacatattatctggtttctgcttgacttttttttttcgggggggcggtggggagaaatagagcatttttcttccataatggtacttctaagacatatctaagcacaaagtgaaaaagaattcaattcttaaactggttctttttttagcgatttaggagaactcagaataagctggggcaagggaaggggactgtcttagtccactggggctgctgtaacaaaataccttagactgggtactttataaacaacaggaatgtattgttcacagttccggaggctgggaagtccaagatcaaggtgccagcagatttggagtctggggagggccattcctcatagatggcgccttccacctgttctcatggggtggaaagggcaggcagctctctggggcctcttttctgaggcactgatgactttcctaagggtggagcctttccagaggccccaccttctaatactatcaccttggtgattaggtttcaacatctgaattttggggactacaaacgttctgaccacagcagggatcaattgattcagtgtcatagaatctctcttaatccttttgaaaatcctttagttagacaaattttaatttgacttcaatcttagtctttagggggtaagtgtaaaaatatgcagcaaaatgctgtcctctctgtctgtctctgtctctgttcgtctccctctctggcacctgtccaggaatgactgcagatggggcagggctgcagctgacttgggagcagccaacctggaggttcttcccccgtgtcccctgatcaaagaacagaagcacctcagcaaccacgccccgtcctggaaagtgttacccccccaaccccagacttctgtttcttgtacccctgtggcttctgctcgctgtcttctccttgtggcagttttcatttcggttgagacagccccagatgggacaggatgggtggggggaggcagaaggcttccaaaaccagcagcagcattacactaggtactcattggcccctttctgtgaccgagttcacactcagaacacacgtgttgaaatcgggaaaaaaacggagacctgttgtatcttgcaaggaaaacgttccttacaggtatatttacagaggactgtgtcacactcaggcagaaatgacctcaacaagacagcctcgtggaaggaagaacacttacctacttaactcccctccccgccccggactgcctagtctagcctagccgtctataacaaccccagtggactgacattccatcttggaatttatggaggtgacaaaagtgtcatttgagatggaccaaacccagcccttccaagaagagctctgtatgttttatcttgacatgtgttgatgaataatgacctgcacacacattctgaatgcaggaagggaagtcctgctctccgtccatcgccagtcactcactcgggggaggccaggaacttagtagctctcggctctggtctgcatcccttcccctcgggttctgctcgcctcggctgtgtctcacaggagtcagcgcccggcggccgtgtgcaggtgctggggccccaccttagctcaagctctcttaaattccttatggcagaatgaaaacaacttcattagggcctacctgagaagaaaacaaaaacaagaaaaagtgtggacatcattatccacttgtcctggctgccttgcccccttctaaccatttcatgcccattctagtgtgggcttctgagtgctcatttggtttttcatatagtttttaaatcagttgttactgtcaagatgaaaacatatcacagatgttagtagcgcagtgctgagtgcttcttaaacagtattaacttacatgcttgatgaccatgtgttcttgattaacaaagccaacgcaagtacaaaaaaaaataaaaattacaagttgttcttaaatttaatgacattttgtaagaacccgtaaggcatattttaaggccagcatattgcatgtgaactcttcctggccctttctctgtggtgttatgaaatgaatgtcacccttttcagggaaaagttttcatttaccgagggaaagagtatgagcgccgggaagattttgaggctcggctcttaactcagtttccaaacgccgagaaaatgaagacaacatctccaccaggcgacgatattaaaaactctcctggccagtgtatcctttaagacaacctcatcaactctgaaaccatggtgatgccattcatttgggtggttgggtgtggtggggggcctctctcatggttgatgtctatgctgccttagtgatccttaaccccctcacctcagatattcagtgcttcacagtgaagcccaaactcgatctgcctcctaagtttcacaggccagtgtcagagcagattgtaaggtaataatcccatttttcttacccaacgtgagggttgtaagaggctgtgtacagatctcttgctaataattccaccttttaaaggacggactttggccatggattcgctttccaaatgctctttctgtcctctttgaagagcaagggaagctaattattttcagcatccaaaaaaagtgacaggagatgttaatccatgtgctgggagcgtgcaaagcctattcctttcccaaagtcagctgacagcaaaaacctaagagggcagtggaggccgtctggtctcctttatagacctgccctgtggggtacaatcccctagggaacttcacagcagtgcacaagtcctgcctgttcccagcaaagccaagttcatacatgtgagtgtggcctgaatgtttgcattttagaaggcgggaaatgggatttgcacatttgctcctggtgacacacaggagaacccttcagccttacagcacagcaattccataatgtagggttatgagggggcttttaaacctcctgagtcaactgtccatatttgagtgagattttctgcctgtcagttgtatcgcacctgacttagcaatggcatagaaagacctgctttagcagatgtgtttgatattaagacttttctgttctgtttgatccatgttctggtgaaaatattaatctctttgatgacctcatattccttaggatcagcttcattttgcttcctgaagtttggtggtttctttaacctttcatcgtttctttgaccttgcatcagcaataatgggaaataaactgggaccctgtttatttacaaatgattgctctcgcaaggcatacattttaagggttgcaacattttttttcagaggccttaagcaaatagtgacgcttagagccttctcagatgcagtagtttcttttgctgtggaagcctgcctgcatttcagtgcaggggagaaatcagtctcagtctctccacgccctgccctgtgcatgcggaaagcctgcctcgtaccccgaccgcggaggcaggttacttatgtttcctgtgtgtcactcttggggtggttgcaaaatctgtgctttgtagatctgaaactaaggtatgtaatacttttttaaaataataataaacacatacgttgaacacaaaagcttttttctctctccttcgcttcacctttcctctgtttttgctcatttcactcttactcagcttctgttttccctcgagggttggcagggacagggaagaggcaaaaactcaagttaatttttccacctgccaacatttccctggctgggagaggacaccaaggcgatggcttcaggtcaaggttagggacattttacaggaggcagtgacatgttctaaggccagaccccgtgtccaaaagcaaattggctatttgccgggttaaatatctaatgatctgtctgtctctgtacagtttttacagggtgaacgaggtccagcgatttgaatattctcggccaatccggaagggagagaaaaacccagacaatgaatttgcggtaaaaaacaaacaaaccaccaaaccaaacaacaaaaaatatcattccgccaccagtagaactgccactggagaagcgtggcctcagaggcagccacggagccatattaaatgtctttgtgtattatgtgcagaaatcttaatctattaccccctccaaagttagaaaaactaattgccatttcactaacaatatgactaaggtcactgagatatttaataaggagactgtgccgtccaaatgccggagctcccatatgagtagcgcactgccttccctgcgagccccaggtgagagagcaggtgcctgtcatctctagttaaaaatggacccaccgagtgctgaggtgcggggtgctgacgtggctttctgcaggtgacacagcagtcagcacatgaactggatctggacccgggtgctcattcctcattcagtatccagcacctgaacttcagtggagcacaacacacaactgcagggttgaccccagcactactagcaatacggaccgggttattctctgtggtggggaccatccagtgcatccagggatgtttggcagcatccctgaacactgcctactaggtgccagtgccaccaccccagttgggacaaccaatcaaaaagatttccaggccaggcatggtggctcacacctgtaatcccaacactttgggaggctgaggcaggtagatcaaattagttcaggagttcgagaccagcctgaccaacatggtaaaacactgtctctactaaaagtacaacattagccgggcgtggtggtgcacgcctgtaatcccagctatttgggaggctgaggcgggagaatcgcttgaacccaggaggcagaggttgcagtgagccaagatcgctccattgcactccagcctggggaacgagagtgaaactccatcaaaaaaataaagtttccagacattgcaaaataaaacatctgccccttgttgcaaaccacggcattcgagttgtagaaataacagcaaacatctttagagccttttttctttatttttttatttttatttgtttattttttttgagacagagcctcgctctgtcgcccaagctggaatgcagtgccatgatctcagctcactgcaagctccgcctcccaggttcacgccattctcctgcctcaccctcccaagtagctgggactacaggtgcccgccactacgcccggctaattttttgtatttttagtagagacggggtttcacggtgttagccagaatggtctcgatctcctgacctcgtgatccccccgcctcagcctcccaaagtgctgggattacaggcgtgagccaccgcgcctggccctagagccttttaaaaattctacatacaaactgctttcatggattcatttgtatttttattttatttatttttttatatagaggtggggtctatgttgctcaggctggtcttgaactcctgggctcaagtgagtggatccatgttgaaaaggcatcaaataagccataatttttttaaaatgttaatgtttatccgtcttgcctgggaaacctccggaaatccttctgtactcctgtattgcaaggaggcattagcccggggacccccaaggaggaccggctctgctgagaatggcttctcttgtgtgccgtccgaaggcatctaggctgcaaaggtcaaaggtgaattaacaccctactcctgaccagagcaaagctcggaacccttccagcagggttgcctcaagtaaagagtggtggctacccagtctccctcccaatccctcaggggtctgccagtcatgggatcctcagggcagtacctgtgagtctcctagctcagctcttaagagccatggggaagttccttccagccccgaggccagattccttgtgtgtcaccaaggagcacaaaggagcttggagttggtgaaatctgcagtattgtgcagtcccagcaggctggttgtttgaagattatgttcaccctatttgttggtgaacccagcaccctggacctcctccaggactggtcactacagtgtccattgtctgcaacagtgcgggcagaacctaggcacgtccaacctggacaccctcgctaagggcagtggctttcagagcagactgcacctgttactgtcatcataagcactaacgctagtgtttatatggagtccctcaactgtgggatttataggcagttcttgaatttccctcacacctctcccatctggcaagtagatatattcttagactataaagaaatagacacaaggaggtcaagtgagccactggagggtgcgcggccagttgggtgcagagctaagaataacgaaggctcttgacattttgagctatgctgagcctcagaggctatgcttcttctaaatggccctgaaatcccctaatggccctgttgaggtccgggcacttggacaaagtgttcggaagctgcaggatttggtccttcacatgccccacaaagccttagataagtgcaacgtcttttgctctactgggaagccagcctcggcccctccagcggggagcctggctccaagtgcagggggctggggaagctgcccaccaggccgagagcagtgcgaggtggctcatccctgcagacctggcaaggggtgactgatgtgctggggagtgagggcactgacgaggaggaagatgagacagggcctgcgtgaggaggagctggccgtaaagcccaggatggaacccagaggtccgtctcagggcatgttgacatgagagaaagcactggaatctggtctagaggtggatgtgagagggccagacctgtttccattgccaggacaaaaacctgagggagccgtccccatggggcaaagaggactggtgtgggacacggaggccttgcctgtgtccttatggcttcagccagctccttccctttcctcctatggaacgtaagaagtttgggataaatgctttccaagatccaagtcagttttctgaaaattttttttttttgagagagagtcttgctctgttgcctaggctgaagtgcagtggtgtaatgtcagctccctgcaacctccgcctcccgagttcaagcgattctcatgcctcagcctcctgagtagctgagactataggcacatgccaccacatctggctaatttttgtatttttagtagagacgggattttgccacgttgcccggcctggtctcgaagtcctgagctcaggcaatctgcccgccctggcctcccaaagtgctgggattacagacgtgagccccccacgcttgtcccagttttctggaatgactggcattccattatcccatctgcttaagtctagattcctgttgacactcagactgctcagtgaccctgcagtgcagggaggttggaatggcagaagattgttgcaagctagacagtacgaacgaggcagtaggataaaggatttccagttgacccctgcattggagtttttgtgcaatccttaaagagtagtagaattgtatttattgggttagaacagtttcctgcaataggtaatatactgttttacaaagaacacattgtcaaatgatgtttttatttaaaatatgcatagacacactttttaatacttagtaagaagtcttgaacaatagatactaaagcatataggttatcagcttcaggtaggggatggtttttcctcctgctctttccatatctttatgttctcatataaacatatattagttacgtcaaaacattttaaagtttaaaataccgactggttttatcagaacatcagaggtcactttgattaaatccagtctcccaaagatgtatttgccccttttagtttcttatgaacactgtagctaatgtaagacttctttggagccttcctcaaaatctgtttgctcaagaggggctccccatacctcattttggagtatacacatctttctcactcacctagtatactttcattgtcaaataccagagtggtgggcaatgttggctaggggacaggggatactttgatgtatcctgagcgaccgttaggtagagcgtggcttgtgaggtgctacctgaaggcacacatgccctgtgctgagcaccacagaccctgtcctgctgaaggacctgactcctttggagttattctataaatcccccttagggcagagctgtccacctgctgacatccttctaacccgtgttgtgtgtgtgtgtttcctttgcagaatatgtggatcgagagaaccatatatacaactgcatataaattacctggaattttaaggtggtttgaggtcaagtctgttttcatggtaaggatggccccaccccagaaggaattgtccgttcccttcctcaatacagtctgccacgccttcttcacctgctcatgccccgtggtcactgtggcagcgtgcacacagcagactctacagttcccataaccaccccacctgttcttgagagcatcgatatctcctcgcctagccatattttagtggaaatgctgtgtaatcacgaccaactctagcttatcaaaaaaccagaatgaagatttcatttcttcttacaatgtatttaaattcagtcatagctgtgctgttttgacaatgctttgtgttaaccaagtgaaaagttgaagacaaattccagtctacataaacttttttaaagatttttttcctgatggttttattgccatttacatgacaaacaactattaattaatagtccttgcccatttcaagtaaaaatagcctgagaacatacccctccctgaccctttttaaagaaataacgatttccagctctcaacaaagctaaactttgctttgagatggggcagtttcatttacgtgaaactcacatttgcagtgagctattggacagtttcatttacatgaaccagagttgggctgcagatttattgacagtattgaaatgtcagggccaaggcaactggcaatataaaaacatctgattgaaatctgtacgtttttgttcatgtgtctcagtgccttttgttttcacctggcaagaactcactgagggggtggcacttgccatttagttttcaatgagtccccccgaaacacctgattatttgtctctaggggccggcatctctctgcccagctgcgtgtccagcgccgagccttctcctttgcccacaccagcatgagctatgggcagctatgggccactctctgagaggttgcccgcagtcagagccactgctttatactcaaagcacccagggctcttcacctacccctcctggggtcactttctgctctggagttccctttctgtgcccctagcagccaggcagtgcctgacagatagaaggctgtgggagttatgtgtcaggtggtaaaaatgcactccctttgctgggtccctttgtagctagtgaggcattgtacatgtgagagacaacagaagagcaggccctccacctaaacaggccgtgatcctcttaatcaccctctgcccatgagccctttgtaatcggggcctgccagccaacagctgccggatgcaggagcttagggaggtggagaggggagccctgacctttcgtgaggatgcagcttctcctcgggctgctttggccattttgaacagactaagagggcaggaaggcaaataatcccagaatggcaggactcacgtcctgctaccaaaccctgatgccctcctcgtgccacctgggaccaacccccgtgggatatctgtgggagcagcagctaaccttcttcaataaaaataggaagggattctttctcagtgcaaatgagattagtaacagggaggtaacagtcagtcctggtggaatactgccctggagtgtgcatttgttgaagctgtgtgcccgggatgaaatgtcgtagggcctggcaaagtaagttgtggggtcaggacagcatggctatgcctgctgtccaggacaccggacaaggggccctctcagcagggtgcacgtggctggccacaccagtgcatcacaatctccccaaggctgtccctccatcagtgcaaggacagtgacatcagtgggcagacaacctctgttatgtccacagccacctaggagtgccagtctagggttgctgacggacagaatcgcccattcgctgttcatctctgccctgccccacccccagctcccaggcagtccgctagaggctgtagcaggaagaaagccggacatgaagataccaagggctcttgggcatgggtgggggcccatcacgcttcctttggaaggagcaaagttattgctgaggtcaccctgggacatggtccccgtggcccagtgtgaggaggaggtttggtctgctcaagcaagacctcagggcagctgtggtccctgccttagacccagccacgttgccctggcaccttagggctgagctggagggcactgggctgggactcggccaggccaggccctgtggggccctcagagaaagagggtggaggtccctgagagacacgcactggagccaggaggacagtggtcagtcccctacctcctgcactgaaggtgtcattaaccatggcaagtgtgcaaatgaagcctgtgagggtggcctggagtgctccaagcagccttttcctcccgaccccaggggccatgagctctctttgttgttgtttgtttgttttttggagtctcactctgttgcccagcctgaatacagtggctcaatctcggctcactgcaacccctgcctcctgggttcaagtaattatcctgccttagcctcccgagtagctgggattacaggcatgcaccaccacacctggctaatttttgtgtttttagtagagacaaggttttgctatgttggccaggctggtcttgaactcctgacctcaggtgacccgcccacctcagcctcccaaagtgctaggattgcaggcaggagccaccacgcctgcccatcactcttccttcacatgatggtgtgtggtgccatggcggagccctgccttgacctcctttgccctccctaaccggacaggtagtgcaggctgcccgggcttagattcctcaaaattcccgaacatcttctccctcagcacaacaagcagagaacaagaacaggattggaagtgtctgttctgaagcaggtgtattcaagcactcaaggctgcgtgttttcctgggatgaccacatatgtgcatagccacatgcacacacacagccccgcccccagagctgagcagcagctttgctttgttcctttggaattttcatctctgggaacaaacaataataataaaatgcccagccacccaaaaattctgtttggaagaaaggttcacggaggagcaggaagcctgccccagagcacgtggctcctctggtgagaccctgggagtggaggcagctgtggggctgacatcgggctctcctctctctttgcaggtggaaatcagccccctggagaatgccattgagaccatgcagctgacgaacgacaagatcaacagcatggtgcagcagcacctggatgaccccagcctgcccatcaacccgctctccatgctcctgaacggcatcgtggacccagctgtcatggggggcttcgcaaactacgaaaaggtacgggacccaccagcttgctctgggcaagcagtcctgcccggggacagactgaaaattcccgagagtccccaaagcccagaaacgcccctggtctcattgagcaatctcagcagtggcccagccaaggccaggcagcagcagccagtggcggcccctgaagcctgcagcaaggtcaaggccggagtcccggcaaggctcccctgggcatccccagacagccaggaagcccccactgacccacccaggctgggcttatctgcacccaggcctccagtggcttttacaaggtctgggatcttacaggccaaaagataaagttagacaaaaacaccagaatatcaggactagggaggtagcgctttgacggtggagggggcccggccagctggtctccctggatcctagctctgtaggaatgggcagaagttgaaggacacagggtgtatcctagaccacccctgcctgtgtttgtaactgcagttcttttggaagaaggccacgcctgtgcacttacttacgcctgaggctgttttcctgatactgtaactggcgagttgagtagtggcagcattgagtagttgtgatagagacctgtatggtccacaacacctaaaatgtttaccatctggcctttcacaaaaaaagcttgttgacccctgatctagacagagcaaaaactgagacaaaaaggatactgcctgagagaaggctgcgaggagatgattacccacccttgcacaaagaagtttgttgccttcaggtgtaggtcaggcctgggcaggtgcaggggctaggcaggaggcatgggcgtgtgagtagctgggagggctgtattcactgccacccagcaggaccaagccaccaggtcagctgtggccttcctggaccccaagaactggggttgctgctgtagacagccctgttagctccacttacagtgtttgaccttgtgggacattttgtcctgggtgctgcgaagggtgtgaccctgagtctgcagtgagcttcgtgtggatctgttttatgcacagctctattctcagggcctggcacacagtaagtgtgcaaaaacctgtgtttgctgagcaggtgcactgagcaactctccttgtctccaccaggccttctttacagaccggtacctgcaggagcaccctgaggcccatgaaaagatcgagaagctcaaggacctgattgcttggcaggtaaagtgtccagcaagagtcctgcatggctggagggaaggaaagctaggagggtctaggctcagcacacacaccagccagcatggaggtccctgggctgcagtcctgatgcacgtggctgtgattgtccctgggtgaacccacccactgctgtcgtgatcaactcagctcctgggctgcagtcaggaatttgaacacccagaaaattatctcttgcaaatgaacaaggtctctttcctccccttggtcaattctgccggctgctggaaaactttttctctgtctgtattgatagaacattgaggtgagctcagagccatgaagccttgagctctagcctgtgccaggaaaggcgctcgggccagtgcagtccctgtgaaacgcatgtacgtcagaagctgcagtgcaccctctccctgttctccgtgcacctctggcggtggtgtgcgtcctcatctgtgttttcccagctgaagttgtgcaagttatttcactgttctacttatgctcctggggcctcgggagcctttcccagagggccagcatcttgaaagggcagaccctgggtgccttgggtttaagtgtcagaaccggacggatgcatctgtgcttctcagagccttcctgagcctggaagtgtaggggtcaagagccagtcctcacaagagcttggccggcaccagcctgctctgctgctttaggccactgcctctttaggcttccttttcacatgtgggaggcaaggagggtgctgtccccgagatcttgccacactgtgtaaagagagttgagggaggtgggggcaaaggcctgcatgggtttggaccaggtgtcgtagcccaggccactttgctaagctggggtcccaggctcccagtcaaggcccagagatgctgtgcagttgatctgcacccagtccagaacagggcaagatacaaaattagctgggcgtggtggtgcacgcctataatcccagctactcaggaggctgaggcaggagaatcgcttgaacccgggaggcggaggttgcagtgagctgagatcacgccactgcactccagcctgggtaacgagcaaaactgtctaaaaaacaaaaaaaaaaggaacagggcaaggctgttcctcttatgagacatcaccgtgagcagtttatttgtttgtttgtttgtttgtttgtttgttttggaggtgaagtctcgctctgttgcccagactggagtgcagtagcgtgacctcagcttactgcaacctcctcctccggggttcaagtgattctcctgccttagccttccaagtagctgggactgcaagtgtgcaccaccatgcccggctaatttttttgtacttgtaatggagatggggttttgccatgttggccaggctggtcttgaactcctgacctcaggtgatccgcccaccttggcctaagtgctgggattacaggcatgagccactgcaccaggccactgtgagcatttttattctgacatcccagcagggcctcttcttagtggcctctctgtcatcagcacattggccaatgagacgtcttagagtggagcaaggctgagctttggttgtgagccaaggtacgagtcctcttaaatttgtgtttagatatataggatgggttggatttttataattctaagtgcttatactgatatgtaaacataatatacattatgtatatattataaataattgtgataaaatatacataacataaaatttcccatcttaaacatttttaagtgtccagttcagaggcaataagtacattcacactgttgtacaaccagcaccgccaccatccatctccagagccttgtcatcttgcaaatctccaactctctacccattgaacgacttccccattcctccctccacccacctcctggtcaccaccattctactttgtgtctctatgaatttgcctactctagatagcttatatgagtggaatcatgtaatacttgtccttctgtgtctggcttgtttctcttagcagaatgtcttccagattcatccatgttgtagtgtgtgtcagaacttcattcctttttaaggctgagtaatactccattatagggctagaccgcaatgtgtttctccacggatctgtcaaggaacaacatgtgggttgtttctaccttttggctggtgtgaacaatgctgctgtgaatgtgggtgtataaatacctgctcaagtccctgctttcaatactcccatagtttggggtatatacccaaatttagaattgctggctcatgtggtattctgtgttttctttttcacgaaactgccaaactcttctacggtcacagcaccatttgacattcccaccagcagtaatgcatgattccaacttctctgcacccccaacaagacttgttattttgtttgtctttttttttttttttttttttttttttgagatggagtctcgctctgtcaccagcctggagtgcagtggcgtgatcttggctcactgcaacctccacctcccgggttcaagcgattctcctgcctcggcctcccgagtagctgggactacagatgtgtgccaccacacctggctaatttttgtatttttggtagagatggggtttcaccatgttggccaggatggtctcgatttcttgacctcgtgatccgcccacctcagcctcccaaagtgctgggattacaggtgtgagccaccgtgcctggcctgtttatcttttaagtaatagccattttaatgagtgagaagttttatttatatgtatatataaacaaaaattatattaaaagggaagaaatcagactttgtcacaaatctgcatttgaaatctgtttgctttggaattatggttttgaacgtcctcagagtttgactgaaagggacattgttggccaactttggcttctttgtatggattgtaagcctcatgtagacagtctccctctgtaactaaaaaagtgggagagagtttaaaattgtgaatgattccattttagatgttgtagattttttactaaagggtacgaaattcaaaattcctctgcaggctataaaactattgctatacaaaaactagtttggtctgcaaaagttctattgattttttttttcctataagcttttacagcaaattggattttaagagtttcaagtcctacagaggaaaataatttgttccccagagagcagctttatgtcagcactatgtcatcattcctaataactatattaaaggatgaattttaaagcaggtcacaggaaaggtaaaagaatcagttttctagtaacttcattaaatcaaagagtgatgaaaaatgcatattccaaacattacctgtgattttgctttcatttgcaaatgtttggaaaacccgtatcttggtattggcaactgagtcatatgttcattaaaaataagaagtttgaatttatcagaatgctttgttctctttttgtttattagttcatctggtttggttttttcctgaaactatcagggcagagtgaggtttttctcctgggagtcccaggactcatgtgcagagttttcatcaccgatatataataagctcagctctgatgcataaaatggtttgtgaaggttggttaataagtcccaggcagctcctcctcagccctgcttgctgcctcagaaacagaggatgggctgacctgctcctcgctgggtgggaggtggcagtcagggtgcacactgtgtggtgcctcttgtaggtttgcggctggcaccaggtcatgagtcactttctcaaaggcacaattccatctttctccatacacagctgtcattgtggagcatccctgccgagtatccaaagacaaatccatacagtctcatattaaactgctgtgatgtatacatatttctcttttgaaatgtacgaagatgaaaggctgaactcagccatcatccccagctgatgacaagcatgactgttgtgtccaggggtggtgctcctggagcattaagcaaggcttccagatgttctgtgctgctttcagggcatgaatctgtgcaggggacagacaggagcaaacttcaaatacggcccatcaggagggcgtctttgtagagcaggctgcaggctcgctttgattaattagaggtgtgacttagggaaagtcctctcccatctctgggctctgagaaactctttaggaatgcagattcctgggatctgcctacagcaaatcagggctctggaggtggggttcaggaatccacctgagattctgatgcttagccagagtggaacccactcaactacagggtctccagagaccatttcagaccctcggtctatgttaagtgctttttgtgcattggaatgtgtttactcagggcatcctcttatcttctttcatttagaatcacacctgcagttcagccccaagtagacatataacagggaaccagttcctgtcctatcagaaggttatttcccatcaacgtcaggaactgctgagagtggtgaattctcacacctggtaaatttcacctatcagattgcagttcgagcagcacaagcgtcctaaaccaaaaggtcttaactctcatctgacaagtaccttctttgacagaaagaatctgaccattaagagttttatcacaccaccatcaacaccaacaacagcaaaactcaggaactagattacattttgtagtttgagaaaggcccgccctaaatcagaaatgcttttagtatctagggtggctgtgctttcaccttgcaacagcacctccacacatccctgcctttgcatccagagagagacccaacacattcgacatcccaccaaaagttgtcccggtctgtctgcgtcatcccccaaggcggaactcaggaggcagaaggctgacagtgagcattttctactgctggccctgagtaaaccgcggctagccccggggaagctgccatctgcacgagtaattcatagggaatattaaaacatcccaagtattttgaaatctctctgtatgctgtcctttcggtgataactggccagaaaggcctgacatgtgcctagggtttggggccaactgtcagcaaaacaaacttttgtgtcggtgcagcctccaagcaggctaggagggctatgagcgaggagagcgctgctactccctcctttcctggagcaccaagagaggcaacagctgtgtgctataaatggtaaccaaatacatttgatgcgttgattcatcttgataagatttcttgaatttgctcacatgaaattcaattgtgtacttattatcgttcatactaataaatctgctcatttagattggtgttctgtcctattaggaaaatctgtttttaatcagtattttgatttaattataaattattgagaggaagcctcttagcttgattacatggaagaatgtctaactgagtccaagccctggggggaagcagagaccagggacagaaagggagacttttccttctcccaccccacaacagcagcaactctggtgggtctctgcagctgggagaatgaaaatgtctctcttagaacgtttttaaaggtcagcttcatctccactctcggaagtgaagtgttggcatggatattttgtgacagcagtgtcgcagagaagcgattatttttagttttaaagaagaataaatttggttttcacttccaaaaaaggaagatttttcaggactatagatcacatgtaattaccttttggaatagggttctcgtaaaggcaatattcttagctaaaaaatgttcgcactctgacatgaccctttgctaatagaacaagttacatctaaacaaattcaaggtgtagctcttcccaaactcaagtgaaaagcacagataagtctattctgggaaattaactgagtagccgtggtgtagggcgcaccacactggacatagtcaattcagaacacaaatggttttcatgtaaacattttggtctttggtggtaatatgcctgctggtaaattgaatcagctggtttgatttggaaaccaaagcagatcgttttgccagttcccctttccccaagtgtgcattgctcgtcctagaccattatccaagaaataaggaatgtcaacctctctgttttccagattccttttctggccgaagggatcagaatccatggagacaaagtcacggaggcactgaggccgttccacgagaggatggaggcctgtttcaaacagctgaaggaaaaggtggagaaagagtacggcgtccgaatcatggtaagagggtagtatgcgtagtgttgcagaagagtgggtgtctgggcatcccactgttgaacagggacaagcttccagagcagaggaactcacatgtacacatggtgcccgcttaggaagtgggatgtgagggagctcagcccccttgggcagtcttgtctaccggcaactcagcaacctcctttcaataactggaaatgtcagggcgaataaacattcatgaatttccttgattaccaaatgccccctcacctgctgtgaacacagtccaaccttattgttgcagagcaatggagaaatctcacagcgcccaggcaactcagctggttgacagtgcacacctacagtcatacaatacacacagagggttcggtcatccacagggcaacagcactcacgacggcccatggcagaggtagcccagcccaaggttgacatcagaggatcatggccatcgaggaagaagtgaccaacatctggagtgtgaaattattagtgaagatttacctattgtaggaaggggtaattgatctagaccaaggaagataagccagatgtggtcaggggaggagatcaagaagacactgcctggggaaaggactccctcaacagaggctgagaggcaggagtttgaatggcaggccaggggccagtgcagacacaggcatgctttgggcagaagagaaaattcagagcggagatggaaaggcacccaacctccaagaacaagggatgctaggctggggcaggaggctctgctcgggatgaagggcagaactgagcttttgcaatgagtttatggaaggtttctgagcaaaggctggcatcaggagcagggtggagagcagcttgagttttaatgatgcaaaaaccttgcagttcaaatcttacagcccacttgagactgtccccaggagccatgccttagcagatgtgggagcaaagccaggcaccgtgagtcacagtgctgccctgctttgcagctcagagtggtgctcccatctttactcagtctctgggagctttgctgggcctaccctgcctgctcgggaactgtggagacaccagacacggcaaagggtccccactccccattgttcagggatgaggggcaatgtggcacagagaagcagggagctctcttctgtctactggaattccatgcctgccggcactgagggggtgtgcacagggcttcaactccccggcaaaaggaaggcgagctgtgggaagtcgcgctgcttctcccaggtaacatacggcactttcctctgctccttgaagaccaggtgtcgagtggggtgtgccattttggtttttttctgggcccagggccgcctgtccaccagtccctgaagttctcagctattctctattgaaccctgttttctttgacacattgatctcaataagcaaacagtaatttagtgctccccacgtgccagggaccttcctaagtgctgtatagatactcagttgcttaatctgcctcacactctgtgaagcaggcactgcagtcacctgcattttacagtcaaggaaacagggacatgggaaggtaagtaggtcacaccctagcacgtggcagacccatggttcaagccctatccatgtacctccagggtctgtgcttttagcccctactccaggggctgacatttggcaccacagagcttctccgcctctttcccacatggtaggaaatgcatatgagacctgggcaacccctgagagaaggtaatttggttatgatcacactgcatgctctcccagtctccccgcctctgccgggcatgaccgaaccttggtgcctccaagcctaggacctggtgtccctcagatgagagggtcccaggcccagcagggcttgaacccaacaaagccaacataacacaactgctgctctgaggttgaaaactcagcaggtgggagtctggaactgccagcccagcgggagctgctgcaggtgaacaggcctggaaatcagggctctgtccttcaaggctgggctggaggatcctttgtgcaagtcagaatgctagagtagcgcttgatagcttcagagcctgcaactcattacagtcagagctgagtggcaagaagcgtttcggagtgcgtcacatcgcatctctttcaaagttgatgcctgtattaattcattctaagaaacaaacacttgtgaaatcttgacattttcttcctaagtgaaaagcttcctcttttctcagtcatttaatgtatatttcaaaatcacagaaagctgtctggctcaccagacatcctgcatattcccttctctgccacattcatgagttctgagtgtgcttgctttgggcacaggtggagaaagcaagggcaggaaggtagggtgctgtggattggtgtgctgtgtggattggggtgccgtgtgaattggggtgccgtgtgaattggagtgccttgtggattggggtgccgtgtggattggggtgtcatgtggattggggtgtcgtgtggattggggtgccatgtcgattgtgccatgtggattgtggtgttgtgtggattggggtgccatgtggattgtggtgttgtgtggattgggctgccatgtggattgtgccatgtggattggggtgtcatgtggattggagtgccgtgtggattggggtgccgtgtggattggggtaccgtgtggattgtggtgctgtgtggactgtgtcatgtggattgtggtgtcctgtggattggggtgctgtgtggattggggtaccgtgtggactgtggtgctgtgtggactgtgtcatgtggattggggtgccgtgtggattggggtaccgtgtggattgtgccgtgtggattggggtgtcgtgtggattggggtgccatgtggattggggtaccgtgtggattgagccgtgtggattggggtaccgtgtggattgtgccgtgtggattggggtgctgtgtggattcgggtaccatgtggattggggtgccgtgtggattgggatgccgtgtggattggggtgccgtgtggattggggtgtcatgtggattggggtgctgtgtggattggggtaccatgtggattggggtgccgtgtggattgggatgctgtgtgtccttggttggagcttatttccagcacattgtgaggcagcaccgtctccatcaacctccccacccttctctgtagcaccagctgggtcaccccgtctagggggtgggaggcttttacagaatgaaggttgcattttccaccctgagatactttgttccccggacccaccttgcagagtcctgctccatcctttgaccgcaacagcaggctctgcaagcatcctttgagagtcaaggggactggcaggtccccttgtccttccctgagaaatgtggcaataaaacgcagtctgggatgtgcctttcctgtcttacctactttggaaacttgcaatcatctcagagcactttgaaaagcaatctagtatcaccctgtttgcaaaaaagatggattttaaaatttaaaaataaacccatagaaaggacataaaccattttgtcagtgtttctgagccagcttaagccatagaaagagaagatgtggacgccctctgacttctcgatacccaggcccctctgccactctgccttggctttcatcgtgttcccagtcctggggctccaaggagctgccattccctggatgggagctctgcagcccagcttctcctgacctttagggagcgaggtgtgcagggccccagggatgagcccgtgagcacctgccacgttcggcattggcccccgtgccctcaccggcccacagcgccacgttcggcattggcccccgtgccctcaccagcccacagcgtgcaggaggcatgtgtgttggccttcaggcttgtgaaaaagagctttaggtttctcaccaaaacttcatctacctcttcaagtccgattaggagcagggaaattgatcctggttctgcattctctctactcccatccacctcatcactccaaacaccatggagagccataaccccaagatgccatcgtccccctctcccctccccacctacagtcacaacacccgctggccacccagacccgggagagaaccaggagtcacccttcctccctcaagttagttctagctgtggtatcccctggtggtgctggggttcaccccaccatctttgccatcacagttggcccctgacctggcccccagcttccaggatttctcctctctcgccctccctccacagctgccggggggacccatcccagtagttctcttaactgggatccatgagaccctggggttcctcagaggctgttgggaggggtgttgactgggaggtggagctgatagcccctgcctcagcaggaacatttagcttcacctattccttgtgctggagttccatggtgaggagaagcagtgtggcatggcctacaagaacagccagggaccagggttctgtttcagatgcagagctgatggtgcagttgtgtccttcagtcttgtggcctctgagggccggccaaggttctaacatcacactcgcaccctccctgctgggcctgcccatcttctgccccaccccccagcccctcctcccccacctgctctctccaaaggaaaatgtgtcaccctctgtggatttccaggctgtagctggcatttgtatagcatctggaaagggacattccagatcacgatgaagtgtgcctgcttcttacccttccttgtacagcactggtccctgtgattaagttcagccaaccccttcaacccagcccattcccatccaagactctgggcagtaaacacctgtggctggctcaaggtgggacgttacagctcagccgggagacagcgacgtaaaactcagggtcattaggcagggccagaggatcgctcctggtcagaaaactggaatgagtgtttgctcaggcggtgaagacagcagcagccatcagggtaaggagccctgtgggcttccccggcatcatttcatttagttctaatgctggccctctgggcagggaagactgctccctgtgtgctcaggaggaagctggggctccgagtggctcggggttttatggagggtcacaccatcagtgccagggccacaattccagcctagttccaatgtccccaactcctacccaccagccctactttcagtcacagtgtctggccgtggagtcccacctcccaggactggttgagaccctaattgcatcagatgaaacaaaagtaaagccctgatgtcttgatttctagaggctcaatcaagaaggaattatgcggcagaccgcccagtaaacccatggtcgcacccagggagtgccctctgtctctccttgacgggagtcatcctcctgccaacccccttcctttattccttgaaatccatactcacacatctcaaccaagacctgaggtcaccttctgagattatgtatggggtaaggttttcacagttggggataatccccaagcaaccatttcccttttagtttcttctaaaggcagagtaattacagtgaacatctccatgaagctatcccctggcaccatcattggtgcaggtccaagactgaccaacccctctctgctggcaaatcccagctgcacgtcactcagagccagtggtcagcaaactgtggcccctggcgtggttgtgtaaataaagttttgttgacaggcaggccatgctcattcatttctgtattatctgtggctgcttttgtgctgtcgtggcagcgcgtgctagtttccacagagaccatatgtcctgcaagcctaaaatacttacctggtcctttgcagcagaggtcccagccctcaggcagtggactggtatcagtctgtggcccgttaggaactgggcccacagctggaggtgagcggcgggtgagggagcattactgtctgagctctgcctcctatcagatcagtggcagcattagattctcatgggagcatgaactcgattgtaaactgtgcatgtgagggatctgggttgtgcactccttatgagaatctaatgcctgatgatctgaggtgcaacagtttcatcctgaaaccatctcctgctggtctgtggaaaaattgtattccacgataccggttcctggtgccaaaaaggttggggacaactgctttacagaaaatgtgggccaattcctgcccttttacaattttgagcttcttattatgaaagagatagtttacacatcaaatgctgttttatttgggatcacatatttaagaaaaaggcccacttttcagaaggggaagtggcgttatattaatcttacctgtaatctaccgcttctggccttggagggctggaaccatggtccacagcaggtcttctgtagttgattggctgaatgagatgggcggggtggggttgcagggtggggaagtcaacgccacacagagaggaggtgccctacaggaacttagtttccacatcctcaggttaaaggaaggtccttgtgcagcagctgcagtcccagatgtgccaacatctggctcggggtgcaggtaccctggaattttctagctaatgagatgtggacacatgctgtatttcaaggacacttgcttctgtaatatgtcaagaagaagatggaaaagtccatctagagatcttttttttgtttgtttttggcacaatgcatcactagttcactacctagcaagtgggagaagctttagcaacttcagcagcggtttcacctactcagtggcttcagtcacttgcagaaaggaaacgtactcttcattaagcagcaggagcatgttatttttgtctagaggaggtcagtcattatggattcatgcattttgatggcccgtgtagtctgtcaacctgcagagatacacaaaatgcatctaaagatcgaaagactctttaatcactctctaggtgttactctacattaaactttctggtcggcacattctcctgtggctttggaatgtgttgacgcatcgcggtctttgaagaaaacttgcactgtgtattaaaaggctaagaaggttccttctgatactttcacagtattgggttaggttttaaaagactcaaaaataatcattgtttttgtcttccactcagaacaagaacatgtactgtttacagaagtctgaacgatgatggtctcgattccacacagctaaggccactttatctcaggagtctgaccatggcaggcacaggcatcaaacaagtctccttctctctctttctcgctctcagccctcaagtctggatgatagaagaggcagccgcccccggtccatggtgcggtccttcacgatgccttcctcatcccgccctctgtctgtggcctctgtctcttccctctcatcggacagcaccccttccagaccaggctccgacgggtgagtcaagctcacagcagggctgagctgagcagtgagggcttgggggatctggaaggagccacccagggctctgggtttattttcttacaactgaggattttgtgttcatcaaaattatctttgaaactgagaccctccgagactttctgaccgtagtgcccaatattactttgaggtcgtgtgagttgttgagaaaaacatcctctctttgggtaccactttgggtgaggttttcatccaatttagaacctccagtgagtgttcagtcctcttcagcatggcttagaacaagcttgtccacccgcggcccacgggccacatgcagcccaggatggctttgaatgtggcccaacaccaatccataaactccttaaaacagtatgagattgtttttgtgatttcttctttttttttttttaatagctcatcagctattgttagtgttagtgtatttcatgtgtggcccaagacaattcttcttcttctaatgtggctcagggaagccaaaagattgggcacccctgggaaaaagcaaggtgcagtccgggctggccaagcactttgtacttttcatctcctgttcacctccagggtgttgtgcccggacaggagctggtgtggtctgaccatgacacaacctccactgtccccctgtgacaccattctgccaagccaactgtcacagagtcaggctttcatgatggatggccgggccttcttttttttttttcttttcctcccttcctcatttttttggagagcaaatgttttgtttatttttgtttctgctgaggtttattgccttttaaagggaaatggtgtttaagtgaatgcttctgagaatgaccatctgtccctactttttaggacaactctggaaaataaaaggcatattatcctttttaaaaaattttgtttttgaggcagactctcactctgccacccaggctggaatgcagtggtgtgatcacagctcactgcagcctccacttcccaagctcaagcgatcataaccatttgtaagtgaacagttcggtggcattgcgtacgttcacatcgctgtgcagccatgaccaccatccacctccagaactctttaatattgccaaactgaaactctgtacccatttaacaacaattccccactctttacctcccatattgattaaacactaactttgcattctttccccccacccctgacaccctgacaatgtctactttctttttttttttttttgagacggagtctccctctgtcgcccaggctgagtgcagtggcacgatctcggctcactgcaacctccgcctcccaggttcaaacaattcttttgcctcagcctcccaagtagctgggcctacaggcacatgccaccatgcctggccaattctttgtatatttagtagagacggggtttcaccatattagccaggatggtctcgatctcctgacctcatgatccgcccgcctcggcctcccaaaatgctgggattacaggtgtgagccaccgcgcctggccaacgtccactttctatcactatgattttgactattctaaatactcatgggccaccttctttgtacaaggccactttggagatgcatttttgctcttgagtacccaatagttaacatttattgagcacacactgtggctctggcattagctcaggttattgcaaagagaactgcaacattggtatttttttgtatttttgagcggcaagcatgtaaagtttgttcttctacaaaaagaaaaaaatgttgcatgcaatttaaacaacacagaagaacctctaattgttttactgctgatttgtacagttgtttgtgtgtccaatcccattttgtttacaatccatcaccctatcaaacccacaggcatctggccccctcaacacacagaaacaaacttccagagagccccaagggacggctcaactcggattgccctttgttgccaacgactgatgtgcccgatggagaattgcaaactatccccatattttttcttaacagtaatttttatcagcgtctgatatttataaggccaagtccatatggaaattctcaatttagaggtatttaaatcatgtgtgcttgtcacttacagcaagattgctaaagaaatttaattcaacttctccccgagaaaatccccggactggttatggaaaggtttttatatttctaggaacataggggttagggtggaaattaatggagaggttttagacagaagagtggtgaattgcacatgtgagctcaggctgctggctcttccccagaaggcatttgtttaacctttaactggaaggcgtctttattacagtccagatttgtgttcattcttggggttaccaccctttgctagctaactaatgtggagaaaatgaggctttggtctcaaatggcacaggttacatgcagaataaagttcatcctgtaggcagttgcttctcgtaatatgaaaatttaaaactccacctgcctttctctgggttctttgtatacgcatcaggatttcacaacccgggtcttctccctgagctaaacagcatctactaatccttttcttacctacattatctcaagttctgctaaacctagaataaaatcatgaaatgtttggttgttgcttataatagataaaatatttctcacctaatggatatggatgtattgtatatccagtgtgaaaagtccagatgtcccaaaatgccttaatgatctaagtcaatattggtatattttatcaatcagtttaaattttttaagcattttagtatagaaaaatgtcaaagctgagtacagtggctcatgcctaaaatcccagcactttgggaggctgaggcaggtggattgcttgagctctggagttcaagaccagcctaggcaacataacaaaaccccatctctacaaaaaaatataaaaattagctgggtgtggtggtgcatgcctgtagtctcagctacctgggaggctgaggtgggaggatcacctgaacctggagaggttgtggctgtagtgagccatgattgaaccactgcactccagcctgggcaacagagtgagactctgtttcagaaaaaaagaaacatttcagatatgtacaaagtgggccaaacagtgtaatgaggcccccatgccccatcatgcagtcttgacaattatcagcttttaactaatctttttttttcaatctgtatcaatcatattttccagcaaatctcaaatatcatattttatctatagctatttcactatgaatttctaatttaaactcttttttaaaaccataactcggttatattatataaactatagtaatatagtttatttcacaccaaaaatattgacaggaattccatattataataatacatgagtgttaatttcccattgtcatgtctttttttttagtttgaggcaaaatccaaataaggttcccaccttgtaccttgcacttggttgatattatctctttaagtctcttttagtccccttttctcccttgtaatttatttgtgggaaatcctaggttgtgtatcctgtcatggtccccaccatcaggactctgctgatagcgtgccctatcgcattgtttaattcgcgtctcgattctccatattccctgcatattggtggttgaatctagcgatttgatcagattcagatttgatttagggacaagatgacttcataggtacttgtgtgttcttccattcagaggcacatcataacctgttctctctcttatggagatgttaacagctattgataatcagtgcttagattcaataccattattgtttacatagtgacctgcagcagatcctactgcacagccatattagatgagagaagcaaagaataggtggtggtccttgctctgggtagtctgcatcttcagcagatttaagcgcagttttgcaaatgatccttcccttcctggttcatcttactccccattatgggacacacaacatggaaataatcaacagtgagcaaatcaatggggagcaagattgctgcaatgaccatctttttttttttttttttttttgagacaggatctggctctgtcacccaggctgtgcaatggcacagtcttggctcactgcaatttctacctcccaggctcaagccatcctgccacctcagcctcctgagtagctgggactataggtgcacaccaccatgcccagctaatttttgtacgttttatcgagactggatcttgccatgttggccaggctggtctcgaactcctgagctcaaatgatccacctgccttagcctccccaagtgctaggattataggcatgagccaccatgcccggccctgcaatggccttcttaatgagaacagtggctttcttccaagtgtcccattcagaaatacatgtaaaagaaactagagctaggatgaaaatatgactggctggctaaattatcttctcttgaaatcatgctccccttgaagaagccaattgcttctccaggcggtcaaggaagtcaggtttggaagttgctgtgaggctcagagctccaaagagcaggctgtattttgaaaatgtaagatcctagtaacagcactgccttccacgtgagttatgctatatggtttttcaggcgggcccatgccttcatccattcaaccatctctcctgactcctcctcacagcaggagctgctagggatgagactccagtcttagagttggatccatttcttccacctcctgataggacttctaggaccagaaacaggatggacatgccaatcttgtgttggagtgacaaatcacaatcatgtgtggatatgcttgcacactaaccttttggtacatgccttagacactagcctaagattcatttactccatggtataaccacgaatgtgtctttacagcaactgtggggtaggcagaagggtggtggtgtctttatacccttttataagtgagacagctgccagaggttacgaggacatcaagagtcacccacagtggcagacctagaatgcaggtcttctgtctccagcttagttgctggctggaaacctcagggcatctccaagcacctgtgagctggccctggcttgcttctgactgagccatgcaaagtgctttcacctgaaaacaaccgtctatctgtaatcatagagccttggtcaggatcaaggtagcagacatttctttgcattgacgtctatttttccccattaaaaaatagacaaaatatttctatataaatctctaaaagacgagggttccccttttgaaatatgccctaaataccatcctcccatcgtaaatgaacaattccttaatatcatcatcaaatatccggtcagacttcacatttgccctatcgtgctaagtgttctatctttttccagtttatctgtgttgggattgaaacacagtccttgcatctggtgactgtgtatctgaagtcacccttggcctcccttttaaatcactgctttcattgtaaatgtcttcgatggattgtgagtgactttacacgtgtctgtgggctggaaagcaattgctctcctattaagacgtcattgacctttcctttaggtttgccctggagcctctcctgccaaagaaaatgcactccaggtcccaggacaagctggacaaggatgacctggagaaggagaagaaggacaagaagaaggaaaaaaggaacagcaaacatcaagagatatttgagaaagaatttaaacccaccgacatttccctgcagcagtctgaggctgtgatcctttcggaaacggtaacccgacagggtatctttcctcgctctgcggtagcttcagggacctacctttgccccacctgtagccaacagggctgacggtgggctcttattgaacttgttataaattagcaactcagaaacctggggtcctcctcccctaacctcaaatgtcccaaggcagtaggacagccagagccacagagagacctggaggaaggtgggcttagcatttgtcccccttccgcagggcctggggcgaggccgctctgctgctaggctctgccgctctgttggacttgtttcctacacatgtcctaatatcccagaagatgagcaggagtccttttgttgtcaggaaacagtccttggtgtccgctaatgccttccccttgccccttgctgactggaactcttctaagctagttacggcccaagtgttaaaatcagcggaactagaatccaaagacctcttcccaccgggccccagaagctggacccagtcctggggtatcctgctctgtctcatctgctccacctttaaatctcctggccgtctttcacaaggacttaacagggacttcacatgacccgtactgctgagctgaccttgaagacgggtcccagtgagtctcgttcattccacagtcgtgggcgtgtgagggcggtgaaacccaggagccggctctcatcctggggctgggcctgagggctgatcctcccagaagtgcaccacattgggaatctgtgttcgtctgttttgtgttactgcaaaggaataactgagcctgcgtcatttatgaagaggttgatttggctcatggttctgcaggctgtacgagcacagcactagcatctgcttggcttctggtgaggcctcaggaggcttttattcttggctgaaggcaggggaggggagcaggcgtgtcacatggtgagaaagagagtatgggtggggggtggggggtgtgttccaggctcttttaaataactaggtctcacatgaactgatagaatgaggacccactcattacccccattactgcaaggacagcaccaagcccttcacgagagatctgctcccaggacccagatgcctcccactggccgcacccccaacatttcaacatgagagttggagaggacagatatccgagctgtatcagagtctgagtgcgaagatgaggcacagcccacttccagggcgaacttgattccaaaagtgctagctgtagtgggaaacaaaaataaagaaggagttctcatgggctgtcagcatcaaaggtgaagtcaggattggagccgccctccctggaaatgggtgggtgtctgcttgtctcagccctgggcgtcggcgggctgtgattagagggttagacatactgcactgcttgtttataacttaaaacccagaaggtacgttttatctatacttcatgccactcagaaagcagtcacatgctacctggctatctagaggtggaaggcaaacgccccagccatgacttgacgtccaacaggccagcgctgctctgcggcctgtgggtaggtgctgtggctgcagctgggctggagaattcccatgagggtggccgaggatgtcagaccaggggggcactggctggaggctggcctgaagtacccagacgctcagcgtccagcagattgaggggttcctgaccacacagcatgctctgtctgctattctggaaagttgagatgcccaccaccccagaggctggctgaagtctccatctcttaagccccaggtagatttctcaagtctcaaaacattatagctgggtaggggaatgaacagaagcatttttgaatattacttagtgccagacactgtgcaagtctttcatacattttaatttaagctccgttttaagatgctaaattggagggcctcggagcagttgtgccaagtggcagaattgatcacagctgacttgtgtgaaaagaagtccaaggacacaagcacacacgtgacaggcacagagccagcacagtgcatcttctgtccctgcccttggtggcccaagcatccttctagggtccttgcaagcagcagggctaggggcagccccacgagggctgcctccccacggctggccctagcaccctcagcaaatccacaggaactcaccaaggtcagagcacagaaccttggcggtgcttctcagcatctggcccagtgtcagcttgaaccttccagcaccaggaggcggagaatccgaacctcccactgggggacaggcttactattcttggtccagcccagcaacctgtctgtctacgcagagggcacctcctccaggggacgggtgccggcaaggtctgtgaggacagtcagacacctgaagtttcctagcaggcggctgcgtgccagtgaccagccatgcgcaggaggggaggtgcgggggaggaggttcacaggaacagaagcagcaacccattccctggggacaacaccagccacccccccaccacccccactgtagtgtcctccttgcccttcccccctgcgggcctcccctgcaccccagcttctgcaaaggttttccctcctcacccctgtggctgggttcggtttcctacttgatttgcatcatcaacaatttcctgacctttagctgagcctctccagccagagcctccaggctgtgatttgcatctcagcagtccagcctcctcagctctctgagtcagaatgtgccctccctgggatgcagggaggccaggagaagcaccttaggagaccccaaatctctcttgccagcacattcaccttcagagagcccagcgcttcacccggcctttcctgacttcccacagcagttttgctgcctggaacaaggccatttcttcagaggaggtgcagctcctgggcgcttggctcccccgacagcacaggacagttctggaaatagacctgttggcctggctctgtcactcatttaccagagggcctgaatcttcctcccaagcctagttcccatttcctccttccagcctcagtaacctccagactggccctggcacagctgactcctcctggggcagacattgaagcctatgtgctctgttgctcacccaaaccagcacagcgcatccaccaggcccccagacccagccgcagccccaagcccagagctgcccactcacctgcctgcccttccttgggggagaacgttgacccctcctttttggctgggttaatacgttttctaattactcctgcgtcagagtattttgtaactgctcctgttccccaaagcctgatgatctgagaccaacctgtaagaaatatgtaaatacaacttactgatggaacaaacagggaaagggcttaggtgggggaaagtcaagtgcctccaaaagccagagatgagcaggaaaaaatgcattgaaaaggagagaaaaagaatccctgcccagtaatgacctaggatgagagaagaagcaaaggaaaggaatagcaaaaatccttcagccaattcctagactttcaggtacacgccaaggagaccaaagcatgctgagcacagctgggaataattctgccatggaacaggccattgattttgttcttgaccgcacggatgttgccccgtgtgtccttgctggctatctgcatgtcttgcaataatactcagccacttttgcatctatattcaggtcacctgcgatgtgctgtccagcccaggctgtgtgaggacagcagtgccagcccctcgtgtgggggaggtctgctgtaaccacatgctgggcggctccaaccccagaaactcattgtctcccagttctagaggcgtcggcagggctgattccttcagaggctgtgagggagagtctacacatgcctctctcctcctgtctgggggtttgctgccatctctggtgtttcttggctgatagaagcatcaccctgacctctgctttcatcttcacgttgtgccctcccaaatttggacacgtccatgtccagatttccctttttcataaggtcacctgtcctgttggaattggacctgttactgggaagtgtgcaggtccttggttcttagtcttcttagaggaaagaattcagccaagagaccaattagtaaagtaggtaaagtaggcttattaaggaaataaaagtagcatggactctgggagaggagcaggctgaccctgtggagagcagcccccaggagttctgtgttgtggtttttatattggactgttttaagctcccacctctgtcttaagcctctccctttgtctttgtctgttttccctgctctgtcttaagtctccaccttttccctgcctagttcctgcccaggtttgtggggctctcccttgctgctagttgatgtgcacacgtggggctcagtgatcagtaggaacctacctaatggcggcattgctcattaccgccaccccaagaaggtcatacagtggtcaaatctgtacatactgtgtgtgtgtatctcttaggcattcatcccttgccctgtttccctcctgatcagcatgtagctagttacattgtcacacgttagctacagagggagcaattactgggtgtcttatggggtgtttcaggatgctgcctcctgcctaggtattctcctcccctctgctcacacctagcatgtgtgttttggggggtctctggggcataaggttttccagagtttcctcccccggtcccccattccttttcatgtcttactatctgcccactctaacaggcccaccctaagagccacaccttagcttgatcatttgcaaagaccctatttccagttaaggtcatattctaaggtaatgggggtcaggacttcaacataggaatttaggtggaaacgcaactcagcccataacagaccgtaactgtgctctttctgtccttttgatgtagataagtcccctgcggccccagagaccgaagagccaggtgatgaacgtcattggaagcgaaaggcgcttctcggtgtccccctcgtcaccgtcctcccagcaaacaccccctccagttacaccaagggccaagctcagcttcagcatgcagtcgagtaagtggaacgctccccacatacgaatcgtgctatagctccgtgacttcccctcactgaaggctctgaggttagaagcgcttcctccctccccttgcagcagagggtgggagtttagataaacacctggctccctgggagtgtcccctgggacaggctgtagagtctggacttccgcaaatcaggccaaaatccagagcccaggtctccagcactggaggggcagaaagtgcagggtctgtcccagggtccatgtggaggggacctgtgaagcacgtggaaccaccacactttctatcccaggacgcagagctgcaggaggccgtgggcctgcttgtgtctaggactgtgcactggagaagcaccttcaggcagttggcaacagctaaggggcacagcttatttttctagttttgaccaatgtttaaattaccctagaagttcccacaaaactggtggctccaaacagcagaaatttgttctctgaaggttttggaggccaaaactctgaaatcaaggaggtagcaagttggttccctctggtggctccaagggagagcctgtcccgggcctccctccagcttctggtggctcccagcagtccctagccctccttggcttgtggccacatcactcccctctctgcccctgtctccacgtggcctccttctcggtgtcctctcttcttacaaggacatcagtcattggatatagggtccactgcaaatccaggatgatctcaccttgagatccttcactaattacatctgcaaagaccctacatccaaataaggtacattctgaggttctgggtggccctaagaggtctacattttggagagactctactcaacttactctaagtggcagacagcttttcaccactagattcagagccagcagagaggagaaatcttggcagggagaaggtgctgaggatggggacggcagcagaaccggggagcccactctccttcctgtggcacagagaggggtcccaggcaggagagctctgtgccctgtggcgagggctgtgcaaggcagtgagtgattgtcctctgctcctgattttcctcttgctgaaaggggagcagtcatgattctggagactgtcagtgggtggggaggctggctgcaggagtggatgcgtgagtctaattgagtaggcaaagagctttctgggcactggatatgtctttggagggtgcatcttcacatccttgcactattactacatgatctttctaaaaatgtgtttaaaatctattttaatattgaaaacagacaccatcactgctgctgcggaaaacaatttagtggttcctccaaagttcaatgtagaataaacctataatatcaactggcagtcctgcttctaggcctgtactccaaagaattgaagacagggactcaaacagatacttaatattcatagcagtatttttcaagagccagtaagcaaacacaggccaaatgtccatcaactgatggccagattaacaaaatgtacgtccaaagaaatgtccgtgcaatggaatattacccagccgtagaaaggagtgaagttctgacacgtgctacagcacggacgaacctcagaaccatgatgctgagtgaaatagatcagtcacaaagggacaaatattatatgactccacctaaatcaaatatctaaggcaagttcatagagacagaaaggcatggctcacgcctgtcatcccagcactttgggagttcgaggtgggtggatcagctgaggtcaggagttcgagaccagccagtcaacatggtaaaaccccgtctctactaaaaatacaataattagctgggtgtggtggtgcgtgcctataatctcagctactcagaaggctgaggcaggagaatcacttgaacctgggaggcggaggttgcagtgagctgagatcgcaccactgcactccagcctgggcgacacagcgagactccatcccaaacaaaaagaaaagaaaaaaaaaaagaaagtagaatagaggatactaggggcgggagagaggagtggagagttactgtttaatgggtacagaattccgtttggggtgatggaaatgtttcagaaatacatcatggtgatggttatcccccacggtcgatgtgattaatgccaccaaattgtcccctaaaggatggctaaaatggcaaattttatgtcgtgtatatcttaccacaataatagcaaagaagtaggcagcaatcatgaggacagtcactcaccgaagccttcgtatttccctcagccccatggcagagcttccttataagcttacagtgtggccttcctagcatgcattttcctaataaaggatttttcatcagatgaatcctaggggaaaactccaaaagagactcatcagtaaaaatgtccatttttctctctttaatataaaagaaaacaaattatctttaagagtctcaacaaggtttgagaaaatatcctgccttaatgattattcctccgtttgaaaacggctattttttccagtttactttaaaaatcaattgtacttccccttggcttatttaaagcaacagccacagtgactgctatggctaatgacttcatgtcatacgactgtggattttcctgtggaaagagatgggaagctgggtggctggtcggcgtgttagactttgcttagtgaatctctccaggtgataactgcaggggtgactgcaggggcctggcttggcttcgaaagcagtagcagcagcagcggagacggtcctgtggcacccagctgtttaacttccaccgaggcagggggcccgagcagggacagaagaggccggggtgaacatcaccctttctacagtggctcgatgccttgcttcacactccagttttagtgttcgtgtgatacttgctattctctttctagaacattgccgttaggagagggtcccaccctttgtgttcgctccctccctgccctcatctgctctgttgacaaacgttttctgccagatgaagtgtttctgctgtgcctgcctctctgggagggaacgtggagcagctccctgagcattcaggctccgtggggaagtcgggctgattttaaatagatcccggttttccaggcttggagctgaacggcatgacgggggcggacgtggccgatgtcccaccccctctgcctctcaaaggcagcgtggcagattacgggaatttgatggaaaaccaggacttgctgggctcgccaacacctccacctccccctccacaccagagggtaagtcggcaatctgaaacacaggctttcattgcttcgcctccacaaagtaggacgagtccctcattccagatactagcaggtttacttcgggctagtgagcacatgaggaaaaccatgtatgatgggcccgggtttgattttgcaaaaagatatcgaagcagtaaggactccagtgggtaagatctgtggctctgcgtcattatcaataactgcatcaaaaagcacattttgatatcatgcctcagaacgaggaagaggatagacattccaaggttgtcatcggttatcatcaccatggagatcattccactggagatgcaattctaatgacattttgatttttgagaagtagcttttctatcaagaggtctgactttttaaagaggttggccaatatcgccctgtatggcaggcacctgttgtacacctgcttggccctggagaagcttgtctccaaacatccctccaggcagcctcacctggtgctgggagctcctgggtggtgacaggcactcaccttacggagactgcagaggacagccaggtttggctcctgggcacagtcatcctcactgtgcccccacccctgggcaccctccccagtgctagttcgggggtgctgacctggcttcctccagcagcactggcctttgtaagcctaagcaacctgctggaacccctcttcagcgtgagtccctgaagctggtaccccccagcagctgttttagtcattcatgccacccaaagtgccttgtgccaaacagcccctgggcctgcctgcccgtacaaatattagtcaaagtcatgaaaagccatttaaacaagcacctcagttaccagttgacagttctagaaacattcttttgagatccaccccgttcctctcctggttctcaaggatgctgtcaggcgtcactcatccctgcgggtcccagccccatcctcatgtcgggcccaggcatgtgtggagggcagcatgagtgggatggaggcgggcgagcgattgactcagccacggcgggaacttctgcttctaggctcaggcctccccaggccatgttattcacagcctttgacaattaaatcagtggtgtctgaagggtaaaatatccctcttcatatgtggacagctggccgtattttttttgctatccagccttagtgaagtaattatatggccgcaaaactcctgtagaacattgaaaacatgagattgttgggtggctctgtttttttcataatggtgagacatggtttttttttttatttttctttaataaacaatataaatcccacgtgccatttctttttctttttttttaatggagactcgttgacggagtgttccacaaggtcattacatcccttatgagaggagtggaagagagagggtgtttgtgtacagcatacgtatttcatcattccctttgtatcagaaaactaaacaagcagtcatctttaatatcaaagaggcagattgctcttctgagacccaagtgccatttaaacaggctccctctccctagagacgcctcgatggggaaccggtcctggaggaggcaccaggttcccctgtgaagagggctttctggcaggctggaatggtttgttgcaccacagaaatggaagccggaccttccccggccatttctaactacttgtgagagtaaaaggagattcgggggggtctaacaagaatattgggttgcttggagtattgtttccctaacagcttcgttaattggtcacattctcttctctctattttattgcaaaggcaggaatgttccccctagtctccctacactagtaaactgaaaattctaaacttagaattacagccaattcctcttcttgttacaaatcaactccggggtaacattttattgtctcaatttcttggatacaccattgtgggttactgatgccacatacagttgattaagtaagggataacatggattagctctctctcaattgataaagggcgtgtgaattcaattagattaatgacccaggtgtctttggtctttgtttcttgtttaatttacttgcagcctgagtgcatgctcaggtgacacgctggtggttagtatgtcatcattaggcagaagcggttgcatttcctggggtgcctccctttgcacaggccctgagagctgttctaggataatgatcatccatctgccatgatgggggtgtgatcaatatcctcctgtcactctcattgatcagcctcaggcttgtaggcaactctgtctttagttgttgccactaagctgtcatttctttccaaatggctcttcctgtcagtaatctgagcttactgagtttatcaccattaatcattttgcttaatggtgataaacttttgacatgctcatacttggcatagaggtcatttgcagcgctgtgttggtatcaggctgtgttagtgtggtccttacctgctcctcattggcctatcagtgagtgtggctttcacatgtaaacaaacagtttcatcagacctcaaaatagatgtctcttttaacggttctaaccaaccttaaaaagacttaattgttgttttaccttccttaatataaggtcatacactcataggacatctttatatcagctttacttttccacatttattctcctctctgtgttaagcattaggtcatttttgtatttactagtctgtgaatcaggaggaaatctgggcgatgagtgagagactactgcgtcactgtctatccttgaaaacctcttttctcacattcagctaaatgcaaacccacactgagaggctgataaaaatccactcttacccttaagttagacgatagtgttctgtgatttcattctggttcttctgcctgtggcatgctcccacttaccctggtctgttcacttcttcattcatttgtttacttacctgttcatttcttcatttatccactgactcgtttattcactcattcatttattcactcattcatccatttttctattcgattgacccatatttctagagagtctcctgcacatcaggtgtgtgtgatgggcatgagggtcccaaaagcaatagggtgcagctgccctcagtcataacactccagccaggtccatcagcaaggggtttgctattatcttcacattggaaattaatgttcttttttggaatctaaagtaatatatgcccatgagctgaagccagccagccagccacctgtttctgtgaatagttttcttggaacacagccacacccctttctgtacacactgtcaatgaccgcttttcggccacaccagtggcattgagtggctgcaacagagaccgtgtggcctgccaaaaagctggaaatatgtactgtctagccctttccaggagaagcttgctaacctttgcccgaagctcagaaagcaaaagaaggtctctcatctcacccctggagagtgcctctaaggacttatttatcccttagacaatagatggataacttggtcgatagcatctagatttaaaaaggccacgcaaagggcaatggtacctctcaggggctgtgcagacggtgggagagtgctcagaggcgtcagaaaggcccaggcccatagcagcccagtcttgagcctagtagacctgccagccccaagtcggacaggatggagcccaactcatgtggggaggatggttccggctgagtggctgtgccaggtcagaccccacctggagacggtgtcttttctgtcaggacatcagttatgtgacatcttccccatcctcatgttttttagcatctgccacctccactgcccagcaaaactccgcctcctccccctccaaagacaactcgcaagcaggcatcggtggactccgggatcgtgcagtgacgtcgcaagcctctctggaaagagtgtgctgcccctccccatctccatgccctctccttctgtgtcccctgagtctgctgtttacctcattgggcctgtgatgttaacatttcgtgcgactgctttttcttcaaaggagttcagttctcaccatggagtgagtggcctttagcgtcatggagcaaggtgggtctgggaggtagatatgggtccgggatgtgctatcgtagttatcagagttgggggcctctgagtgtgtctggctctgagagagtctgagtcttgcccaaacattctttctttttgtgccaaatgacttgcatttgcaaagagctcaattgctctgagctcagccaagtaggagaggctaggccatcactcttaggaagctgtgtagtgatgatgtataagaatcctcctcactgtcatgggatgttgtatccagcccctccttgttccagccggtggtgtgacttcgttggttgaggtgtgtctccaacctacatcagaccatgaagttcaacccctccagggaagctcctgatttcccctgcataattgaaaataggatatttctcagctattgaacagttactaatttatggggtggaaacagcattaagaatactgaatcaaatggaaaaacaaatgaatacaggaagataagtgttcgttcttttctgaaaaagagtatgtgtaccacaagagctggttttaattgggtgaattgtttttgtcctcattctgtacagaaatttgtatatatgatggttcttagaacttgttttaatttttgtggtccttccgtttattataataggcgtccaccaatgattatccatatgtgttcttaatttttaactgctggaagtgttaaaacacacacacacacacacacacattttttttttgagaactccaaagtcctgaaaattttggtggacaatgatttttaaaaaactaactttgtataacctaatatttgtattctctcatctatatttttttattcactataatcatgatactcttctaatagacttaaaagttaatcattgacaacgaaaaataaaatgttattttaaaaga

(The sequence listing continues in the following parts.)
